(19) United States
(12) Patent Application Publication
(10) Pub. No.: US 2018/0291353 A1
(43) Pub. Date: Oct. 11, 2018

(54) MONOFUNCTIONAL ALDEHYDE AND ALCOHOL DEHYDROGENASES FOR PRODUCTION OF FUELS AND COMMODITY CHEMICALS

(71) Applicants: The Regents of the University of California, Oakland, CA (US); Calysta, Inc., Menlo Park, CA (US)

(72) Inventors: Michelle C.Y. CHANG, Berkeley, CA (US); Matthew DAVIS, Berkeley, CA (US); Josh SILVERMAN, Menlo Park, CA (US); Drew REGITSKY, Menlo Park, CA (US)

(73) Assignees: The Regents of the University of California, Oakland, CA (US); Calysta, Inc., Menlo Park, CA (US)

(21) Appl. No.: 15/575,709

(22) PCT Filed: May 27, 2016
(86) PCT No.: PCT/US2016/034798

§ 371 Date: Nov. 20, 2017

Related U.S. Application Data
(60) Provisional application No. 62/167,841, filed on May 28, 2015.

(51) Int. Cl. C12N 9/04; C12N 9/02; C12P 7/16; C12P 7/26; C12P 7/18; C12P 7/04; C12N 9/88

(52) U.S. Cl. CPC C12N 9/0006; C12Y 101/01001; C12Y 102/0101; C12N 9/0008; C12Y 103/01038; C12N 9/88; C12P 7/16; C12P 7/26; C12P 7/18; C12P 7/04; C12Y 402/01017; C12N 9/001

(57) ABSTRACT

The present disclosure relates generally to the production of alcohols, and more specifically to biological platforms for the production of alcohols using monofunctional aldehyde dehydrogenases and monofunctional alcohol dehydrogenases.

### CROSS-REFERENCE TO RELATED APPLICATION

[0001] This application claims the benefit of U.S. Provisional Application No. 62/167,841, filed May 28, 2015, which is hereby incorporated herein by reference in its entirety.

### STATEMENT REGARDING FEDERALLY-SPONSORED RESEARCH

[0002] This invention was made with government support under Grant No. 30221-10805-CCMCC awarded by the National Science Foundation. The government has certain rights in the invention.

### SUBMISSION OF SEQUENCE LISTING ON ASCII TEXT FILE

[0003] The content of the following submission on ASCII text file is incorporated herein by reference in its entirety: a computer readable form (CRF) of the Sequence Listing (file name: 416272010340SeqList.txt, date recorded: May 26, 2016, size: 1,285 KB).

### FIELD

[0004] The present disclosure relates generally to the production of alcohols, and more specifically to biological platforms for the production of alcohols using monofunctional aldehyde dehydrogenases and monofunctional alcohol dehydrogenases.

### BACKGROUND

[0005] The rise in global energy usage, together with the disappearance of fossil fuel reserves, has highlighted the importance of developing technologies to harness new and renewable energy sources. In addition to sustainability, climate change is another major issue that has driven the search for clean, carbon-neutral fuels and commodity chemicals. In an effort to meet these goals, chemicals derived from plant biomass are being explored as potential substitutes. In this approach, abundant and renewable plant material is harvested as a feedstock for microbial fermentation after biomass pretreatment and processing. The major biofuel in use today is ethanol, but ethanol has major shortcomings including the low energy return compared to gasoline, high vaporizability, as well as miscibility with water.

[0006] In view of these facts and the growing global demand in biofuels, a significant need exists for improved biofuels and methods for biofuel synthesis, particularly for biofuels that exhibit improved characteristics over ethanol.

### BRIEF SUMMARY

[0007] In one aspect, the present disclosure relates to recombinant host cell that facilitates the production of an alcohol from an acyl-CoA, where the host cell includes: a) a first nucleic acid which encodes a polypeptide involved in the stepwise conversion of an acyl-CoA to a substrate for a monofunctional aldehyde dehydrogenase; b) a second nucleic acid which encodes a monofunctional aldehyde dehydrogenase; and c) a third nucleic acid which encodes a monofunctional alcohol dehydrogenase; where at least one nucleic acid selected from the group of the first nucleic acid, the second nucleic acid, and the third nucleic acid is a recombinant nucleic acid. In some embodiments, the host cell is E. coli. In some embodiments that may be combined with any of the preceding embodiments, at least two nucleic acids selected from the group of the first nucleic acid, the second nucleic acid, and the third nucleic acid are separate nucleic acids. In some embodiments that may be combined with any of the preceding embodiments, the recombinant nucleic acid encodes a polypeptide selected from the group of an acetoacetyl-CoA thiolase, a 3-hydroxybutyryl-CoA dehydrogenase, a crotonase, a trans-enoyl-CoA reductase, a monofunctional aldehyde dehydrogenase, and a monofunctional alcohol dehydrogenase. In some embodiments, the acetoacetyl-CoA thiolase has at least 80% amino acid identity to SEQ ID NO: 33, the 3-hydroxybutyryl-CoA dehydrogenase has at least 80% amino acid identity to SEQ ID NO: 34, the crotonase has at least 80% amino acid identity to SEQ ID NO: 36, and the trans-enoyl-CoA reductase has at least 80% amino acid identity to SEQ ID NO: 37. In some embodiments that may be combined with any of the preceding embodiments, the monofunctional aldehyde dehydrogenase has at least 80% amino acid identity to SEQ ID NO: 16 and the monofunctional alcohol dehydrogenase has at least 80% amino acid identity to SEQ ID NO: 17. In some embodiments that may be combined with any of the preceding embodiments, the acyl-CoA is acetyl-CoA. In some embodiments that may be combined with any of the preceding embodiments, the alcohol is selected from the group of n-butanol, crotyl alcohol, 1,3-butanediol, and 4-hydroxy-2-butanone. In some embodiments that may be combined with any of the preceding embodiments, the host cell exhibits reduced activity of one or more polypeptides selected from the group of adhE, ldhA, ack-pta, poxB, and frdBC, or homologs thereof, as compared to a corresponding control cell. In some embodiments, the host cell includes knockout mutations in adhE, ldhA, ack-pta, poxB, and frdBC, or homologs thereof. In some embodiments that may be combined with any of the preceding embodiments, the host cell further includes a monofunctional secondary alcohol dehydrogenase. In some embodiments, the monofunctional secondary aldehyde dehydrogenase has at least 80% amino acid identity to SEQ ID NO: 250.

[0008] In another aspect, the present disclosure relates to a recombinant host cell for the production of n-butanol, the host cell including: a) a nucleic acid encoding an acetoacetyl-CoA thiolase capable of catalyzing the conversion of acetyl-CoA to acetoacetyl-CoA; b) a nucleic acid encoding a 3-hydroxybutyryl-CoA dehydrogenase capable of catalyzing the conversion of acetoacetyl-CoA to 3-hydroxybutyryl-CoA; c) a nucleic acid encoding a crotonase capable of catalyzing the conversion of 3-hydroxybutyryl-CoA to crotonyl-CoA; d) a nucleic acid encoding a trans-enoyl-CoA reductase capable of catalyzing the conversion of crotonyl-CoA to butyryl-CoA; e) a nucleic acid encoding a monofunctional aldehyde dehydrogenase capable of catalyzing the conversion of butyryl-CoA to butyraldehyde; and f) a nucleic acid encoding a monofunctional alcohol dehydrogenase capable of catalyzing the conversion of butyraldehyde to n-butanol, where one or more of the nucleic acids are recombinant, and where the host cell is capable of producing at least 10-fold more n-butanol than ethanol.

[0009] In another aspect, the present disclosure relates to a recombinant host cell for the production of crotyl alcohol, the host cell including: a) a nucleic acid encoding an acetoacetyl-CoA thiolase capable of catalyzing the conversion of acetyl-CoA to acetoacetyl-CoA; b) a nucleic acid encoding a 3-hydroxybutyryl-CoA dehydrogenase capable of catalyzing the conversion of acetoacetyl-CoA to 3-hydroxybutyryl-CoA; c) a nucleic acid encoding a crotonase capable of catalyzing the conversion of 3-hydroxybutyryl-CoA to crotonyl-CoA; d) a nucleic acid encoding a monofunctional aldehyde dehydrogenase capable of catalyzing the conversion of crotonyl-CoA to crotonaldehyde; and e) a nucleic acid encoding a monofunctional alcohol dehydrogenase capable of catalyzing the conversion of crotonaldehyde to crotyl alcohol, where one or more of the nucleic acids are recombinant.

[0010] In another aspect, the present disclosure relates to a recombinant host cell for the production of 1,3-butanediol, the host cell including: a) a nucleic acid encoding an acetoacetyl-CoA thiolase capable of catalyzing the conversion of acetyl-CoA to acetoacetyl-CoA; b) a nucleic acid encoding a 3-hydroxybutyryl-CoA dehydrogenase capable of catalyzing the conversion of acetoacetyl-CoA to 3-hydroxybutyryl-CoA; c) a nucleic acid encoding a monofunctional aldehyde dehydrogenase capable of catalyzing the conversion of 3-hydroxybutyryl-CoA to 3-hydroxybutyraldehyde; and d) a nucleic acid encoding a monofunctional alcohol dehydrogenase capable of catalyzing the conversion of 3-hydroxybutyraldehyde to 1,3-butanediol, where one or more of the nucleic acids are recombinant.

[0011] In another aspect, the present disclosure relates to a recombinant host cell for the production of 4-hydroxy-2-butanone, the host cell including: a) a nucleic acid encoding an acetoacetyl-CoA thiolase capable of catalyzing the conversion of acetyl-CoA to acetoacetyl-CoA; b) a nucleic acid encoding a monofunctional aldehyde dehydrogenase; and c) a nucleic acid encoding a monofunctional alcohol dehydrogenase, where one or more of the nucleic acids are recombinant.

[0012] In another aspect, the present disclosure relates to a recombinant host cell for the production of one or more C4 alcohols, the host cell including: a) a nucleic acid encoding an acetoacetyl-CoA thiolase; b) a nucleic acid encoding a 3-hydroxybutyryl-CoA dehydrogenase; c) a nucleic acid encoding a crotonase; d) a nucleic acid encoding a trans-enoyl-CoA reductase; e) a nucleic acid encoding a monofunctional aldehyde dehydrogenase; and f) a nucleic acid encoding a monofunctional alcohol dehydrogenase, where one or more of the nucleic acids are recombinant, and where the host cell is capable of producing a C4 alcohol at concentrations that are at least 10-fold higher than the concentration of ethanol produced by the host cell. In some embodiments, the C4 alcohol is selected from the group of n-butanol, crotyl alcohol, 1,3-butanediol, and 4-hydroxy-2-butanone.

[0013] In another aspect, the present disclosure relates to a method of producing an alcohol from an acyl-CoA, the method including: a) providing the recombinant host cell of any one of the preceding embodiments; and b) culturing the recombinant host cell in a culture medium including a suitable carbon source such that the host cell produces an alcohol. In some embodiments, the method further includes a step of substantially purifying the alcohol from the culture medium.

[0014] In another aspect, the present disclosure relates to a method of producing n-butanol, the method including: a) providing the recombinant host cell that produces n-butanol; and b) culturing the recombinant host cell in a culture medium including a suitable carbon source such that the host cell produces n-butanol, where the host cell produces at least 10-fold more n-butanol than ethanol. In some embodiments, the method further includes a step of substantially purifying n-butanol from the culture medium.

[0015] In another aspect, the present disclosure relates to a method of producing crotyl alcohol, the method including: a) providing the recombinant host cell that produces crotyl alcohol; and b) culturing the recombinant host cell in a culture medium including a suitable carbon source such that the host cell produces crotyl alcohol. In some embodiments, the method further includes a step of substantially purifying crotyl alcohol from the culture medium.

[0016] In another aspect, the present disclosure relates to a method of producing 1,3-butanediol, the method including: a) providing the recombinant host cell that produces 1,3-butanediol; and b) culturing the recombinant host cell in a culture medium including a suitable carbon source such that the host cell produces 1,3-butanediol. In some embodiments, the method further includes a step of substantially purifying 1,3-butanediol from the culture medium.

[0017] In another aspect, the present disclosure relates to a method of producing 4-hydroxy-2-butanone, the method including: a) providing the recombinant host cell that produces 4-hydroxy-2-butanone; and b) culturing the recombinant host cell in a culture medium including a suitable carbon source such that the host cell produces 4-hydroxy-2-butanone. In some embodiments, the method further includes a step of substantially purifying 4-hydroxy-2-butanone from the culture medium.

[0018] In another aspect, the present disclosure relates to a method of producing one or more C4 alcohols, the method including: a) providing the recombinant host cell that produces a C4 alcohol; and b) culturing the recombinant host cell in a culture medium including a suitable carbon source such that the host cell produces a C4 alcohol, where the host cell produces the C4 alcohol at concentrations that are at least 10-fold higher than the concentration of ethanol produced by the host cell. In some embodiments, the method further includes a step of substantially purifying the C4 alcohol from the culture medium. In some embodiments that may be combined with any of the preceding embodiments, the C4 alcohol is selected from the group of n-butanol, crotyl alcohol, 1,3-butanediol, and 4-hydroxy-2-butanone.

[0019] In another aspect, the present disclosure relates to a recombinant polypeptide including an amino acid sequence selected from the group of SEQ ID NO: 60, SEQ ID NO: 61, SEQ ID NO: 62, SEQ ID NO: 63, SEQ ID NO: 64, SEQ ID NO: 65, SEQ ID NO: 66, SEQ ID NO: 67, SEQ ID NO: 68, SEQ ID NO: 69, SEQ ID NO: 70, SEQ ID NO: 71, SEQ ID NO: 72, SEQ ID NO: 73, SEQ ID NO: 74, SEQ ID NO: 75, SEQ ID NO: 76, SEQ ID NO: 77, SEQ ID NO: 78, SEQ ID NO: 79, SEQ ID NO: 80, SEQ ID NO: 81, SEQ ID NO: 82, SEQ ID NO: 83, SEQ ID NO: 84, SEQ ID NO: 85, SEQ ID NO: 86, SEQ ID NO: 87, SEQ ID NO: 88, SEQ ID NO: 89, SEQ ID NO: 90, SEQ ID NO: 91, SEQ ID NO: 92, SEQ ID NO: 93, SEQ ID NO: 94, SEQ ID NO: 95, SEQ ID NO: 96, SEQ ID NO: 97, SEQ ID NO: 98, SEQ ID NO: 99, SEQ ID NO: 100, SEQ ID NO: 101, SEQ ID NO: 102, SEQ ID NO: 103, SEQ ID NO: 104, SEQ ID NO: 105, SEQ ID NO: 106, SEQ ID NO: 107, SEQ ID NO: 108, SEQ ID NO: 109, SEQ ID NO: 110, SEQ ID NO: 111, SEQ ID NO: 112, SEQ ID NO: 113, SEQ ID NO: 114, SEQ ID NO: 115, SEQ ID NO: 116, SEQ ID NO: 117, SEQ ID NO: 118, SEQ ID NO: 119, SEQ ID NO: 120, SEQ ID NO: 121, SEQ ID NO: 122, SEQ ID NO: 123, SEQ ID NO: 124, SEQ ID NO: 125, SEQ ID NO: 126, SEQ ID NO: 127, SEQ ID NO: 128, SEQ ID NO: 129, SEQ ID NO: 130, SEQ ID NO: 131, SEQ ID NO: 132, SEQ ID NO: 133, SEQ ID NO: 134, SEQ ID NO: 135, SEQ ID NO: 136, SEQ ID NO: 137, SEQ ID NO: 138, SEQ ID NO: 139, SEQ ID NO: 140, SEQ ID NO: 141, SEQ ID NO: 142, SEQ ID NO: 143, SEQ ID NO: 144, SEQ ID NO: 145, SEQ ID NO: 146, SEQ ID NO: 147, SEQ ID NO: 148, SEQ ID NO: 149, SEQ ID NO: 150, SEQ ID NO: 151, SEQ ID NO: 152, SEQ ID NO: 153, and SEQ ID NO: 154.

[0020] In another aspect, the present disclosure relates to a recombinant nucleic acid including a nucleotide sequence selected from the group of SEQ ID NO: 155, SEQ ID NO: 156, SEQ ID NO: 157, SEQ ID NO: 158, SEQ ID NO: 159, SEQ ID NO: 160, SEQ ID NO: 161, SEQ ID NO: 162, SEQ ID NO: 163, SEQ ID NO: 164, SEQ ID NO: 165, SEQ ID NO: 166, SEQ ID NO: 167, SEQ ID NO: 168, SEQ ID NO: 169, SEQ ID NO: 170, SEQ ID NO: 171, SEQ ID NO: 172, SEQ ID NO: 173, SEQ ID NO: 174, SEQ ID NO: 175, SEQ ID NO: 176, SEQ ID NO: 177, SEQ ID NO: 178, SEQ ID NO: 179, SEQ ID NO: 180, SEQ ID NO: 181, SEQ ID NO: 182, SEQ ID NO: 183, SEQ ID NO: 184, SEQ ID NO: 185, SEQ ID NO: 186, SEQ ID NO: 187, SEQ ID NO: 188, SEQ ID NO: 189, SEQ ID NO: 190, SEQ ID NO: 191, SEQ ID NO: 192, SEQ ID NO: 193, SEQ ID NO: 194, SEQ ID NO: 195, SEQ ID NO: 196, SEQ ID NO: 197, SEQ ID NO: 198, SEQ ID NO: 199, SEQ ID NO: 200, SEQ ID NO: 201, SEQ ID NO: 202, SEQ ID NO: 203, SEQ ID NO: 204, SEQ ID NO: 205, SEQ ID NO: 206, SEQ ID NO: 207, SEQ ID NO: 208, SEQ ID NO: 209, SEQ ID NO: 210, SEQ ID NO: 211, SEQ ID NO: 212, SEQ ID NO: 213, SEQ ID NO: 214, SEQ ID NO: 215, SEQ ID NO: 216, SEQ ID NO: 217, SEQ ID NO: 218, SEQ ID NO: 219, SEQ ID NO: 220, SEQ ID NO: 221, SEQ ID NO: 222, SEQ ID NO: 223, SEQ ID NO: 224, SEQ ID NO: 225, SEQ ID NO: 226, SEQ ID NO: 227, SEQ ID NO: 228, SEQ ID NO: 229, SEQ ID NO: 230, SEQ ID NO: 231, SEQ ID NO: 232, SEQ ID NO: 233, SEQ ID NO: 234, SEQ ID NO: 235, SEQ ID NO: 236, SEQ ID NO: 237, SEQ ID NO: 238, SEQ ID NO: 239, SEQ ID NO: 240, SEQ ID NO: 241, SEQ ID NO: 242, SEQ ID NO: 243, SEQ ID NO: 244, SEQ ID NO: 245, SEQ ID NO: 246, SEQ ID NO: 247, SEQ ID NO: 248, and SEQ ID NO: 249.

[0021] In another aspect, the present disclosure relates to a host cell including a recombinant polypeptide of any of the preceding embodiments, or a host cell including a recombinant nucleic acid of any of the preceding embodiments.

### DESCRIPTION OF THE FIGURES

[0022] FIG. 1 illustrates a model demonstrating channeling of the volatile aldehyde intermediate in bifunctional AdhE enzymes. Both activities (aldehyde dehydrogenase activity and alcohol dehydrogenase activity) are contained on the same polypeptide and it is believed that this organization helps to channel the acyl-CoA substrate to the final alcohol product.

[0023] FIG. 2A-FIG. 2B illustrate that AdhE2 mutants do not produce significantly more butanol than wild-type (WT) AdhE2 in conjunction with lower ethanol production. The fuel titer of butanol in E. coli cells expressing the biosynthetic pathway shown in FIG. 6A with various particular AdhE2 variants incorporating amino acid substitutions from the AdhE2 superfamily is shown. The x-axis labels indicate the particular AdhE2 variant being expressed in the E. coli, with wild-type AdhE2 also shown for comparison. In each figure, E. coli DH1 was transformed with pT5T33-phaA.HBD-crt and pCDF3-ter-AdhE2 variant as indicated. FIG. 2A illustrates the butanol production for AdhE2 variants #76930 to #76978. FIG. 2B illustrates the butanol production for AdhE2 variants #76979 to #77025, and also includes WT AdhE2 (GI 499193180). AdhE2 and variants thereof shown in FIG. 2A and FIG. 2B include SEQ ID NOs: 60-154.

[0024] FIG. 3 illustrates that bifunctional AdhE2 homologs do not have improved specificity for C4 substrates. The fuel titer of either butanol or ethanol in E. coli cells expressing the biosynthetic pathway shown in FIG. 6A with various particular AdhE2 homologs is shown. Specifically, E. coli DH1 was transformed with pT5T33-phaA.HBD-crt and pCDF3-ter-AdhE2 homolog as indicate or with WT AdhE2. The x-axis labels indicate the particular AdhE2 homolog being expressed (GI accession) in the E. coli, with wild-type AdhE2 also shown for comparison. AdhE2 homologs shown include SEQ ID NOs: 42-59.

[0025] FIG. 4A-FIG. 4B illustrate in vitro preparation and characterization of aldehyde dehydrogenase 16 (ALDH16). As an example of a monofunctional aldehyde dehydrogenase useful for the production of butanol, ALDH16 was purified and characterized in vitro. This characterization revealed ALDH16 to exist as a tetramer and exhibit 73-fold specificity for butyryl-CoA vs acetyl-CoA. FIG. 4A illustrates SDS-PAGE gel of HisTEV-ALDH16 purification. FIG. 4B illustrates a size-exclusion chromatogram of GA-ALDH16.

[0026] FIG. 5 illustrates genetically engineered improvement of a butanol production pathway composed of monofunctional aldehyde and alcohol dehydrogenases. The fuel titer of either butanol or ethanol in E. coli cells expressing the biosynthetic pathway shown in FIG. 6A with various particular alcohol and/or aldehyde dehydrogenases is shown. Specifically, E. coli MC1.24 (quintuple KO) was transformed with pT533-phaA.HBD, pBBR2-aceE.F.lpd and 1: pCWO.trc-ter-adhE2, 2: pCDF3-aldh16, 3: pCWori-ter-aldh16.CaADH, or 4: pCWO.trc-ter-aldh16.CaADH as indicated.

[0027] FIG. 6A-FIG. 6C illustrate exemplary biosynthetic pathways for butanol (FIG. 6A), crotyl alcohol (FIG. 6B), and 1,3-butanediol (FIG. 6C) production.

[0028] FIG. 7 illustrates butanol, 1,3-butanediol, and crotyl alcohol production in E. coli genetically engineered to express one of the biosynthetic pathways presented in FIG. 6A-FIG. 6C. The genetically modified cells express either the biosynthetic pathway for butanol (FIG. 6A), crotyl alcohol (FIG. 6B), or 1,3-butanediol (FIG. 6C) production. Each group of bars on the X-axis indicates a different E. coli cell line expressing a particular aldehyde dehydrogenase (ALDH) in the specific biosynthetic pathway as described above. Specifically, E. coli MC1.24 (quintuple KO) was transformed with pT5T33-phaA.HBD-crt and pCDF3-ter-aldh 1-16 as indicated for butanol production, pT533-phaA.HBD and pCDF3-aldh 1-16 as indicated for 1,3-butanediol production, or pT5T33-phaA.HBD-crt and pCDF3-aldh 1-16 as indicated for crotyl alcohol production. Each E. coli line contained only one of the recombinant aldh genes 1-16.

[0029] FIG. 8 illustrates a sequence similarity network of alcohol dehydrogenases and 1,3-propanediol dehydrogenases. The alcohol dehydrogenase sequence family (EC 1.1.1.1) was downloaded from Pfam (PF00465) and filtered using CD-HIT (cd-hit.org) to remove sequences of greater than 80% identity. The remaining sequences were compared with all-vs-all protein BLAST and the results were imported to Cytoscape (cytoscape.org) to visualize clusters of related protein sequences. Protein sequences are represented as nodes, which are connected by edges if the BLAST e-value between two proteins is above an arbitrary cutoff. An e-value cutoff of e-100 was chosen to separate various classes of alcohol dehydrogenases (e.g. butanol dehydrogenases and 1,3-propanediol dehydrogenases) to identify potential alcohol dehydrogenases for production of 1,3-butanediol. Alcohol dehydrogenases 1-16 were then randomly selected from the resulting clusters.

[0030] FIG. 9 illustrates a gas chromatogram and EI mass spectrum of 1,3-butanediol produced by engineered E. coli. Culture supernatant from E. coli strains harboring 1,3-butanediol production pathways was analyzed by GC-MS. Retention time and fragmentation pattern agree with a commercial authentic standard (Sigma).

[0031] FIG. 10 illustrates the screening of alcohol dehydrogenases useful for production of 1,3-butanediol. Alcohol dehydrogenases 1-16 (listed by UniProt ID) were identified bioinformatically (See FIG. 8) and cloned into plasmid pCWO.trc-aldh16 to generate pairs of aldehyde and alcohol dehydrogenases useful for production of 1,3-butanediol. E. coli MC1.24 (DH1 ΔadhE ΔldhA Δack-pta ΔpoxB ΔfrdBC) was transformed with pT533-phaA.phaB and pCWO.trc-aldh16.adh 1-16 as indicated (by UniProt ID) and cultured anaerobically for 3 days. Culture supernatant was harvested and 1,3-butanediol titers were quantified by GC-MS. Each E. coli line contained only one of the recombinant adh genes 1-16.

[0032] FIG. 11 illustrates 1,3-butanediol and 4-hydroxy-2-butanone production using various combinations of monofunctional aldehyde and alcohol dehydrogenases. E. coli MC1.24 (DH1 ΔadhE ΔldhA Δack-pta ΔpoxB ΔfrdBC) was transformed with pT533-phaA.phaB and engineered to express the specific aldh and adh as indicated (pCWO.trc-aldh.adh). Cells were cultured anaerobically for 3 days. Culture supernatant was harvested and 1,3-butanediol and 4-hydroxy-2-butanone titers were quantified by GC-MS.

[0033] FIG. 12A-FIG. 12C illustrate exemplary variant pathways for 4-hydroxy-2-butanone production (FIG. 12A), 1,3-butanediol production (FIG. 12C), or both 4-hydroxy-2-butanone and 1,3-butanediol production (FIG. 12B).

[0034] FIG. 13 illustrates the production titers of 4-hydroxy-2-butanone and/or 1,3-butanediol by expressing the pathway described in FIG. 12A, FIG. 12B, or FIG. 12C in E. coli MC1.24.

[0035] FIG. 14 illustrates a size-exclusion chromatogram of GA-ALDH3.

[0036] FIG. 15 illustrates an exemplary variant pathway for control of pathway side-products resulting from a promiscuous ALDH and ADH pair by expression of a secondary alcohol dehydrogenase. Expression of a secondary alcohol dehydrogenase can reduce any accumulated 4-hydroxy-2-butanone (hydroxybutanone) to 1,3-butanediol (butanediol).

[0037] FIG. 16 illustrates the results of a screen of secondary alcohol dehydrogenases when expressed in the pathway described in FIG. 15. The production titers of 4-hydroxy-2-butanone (hydroxybutanone) and 1,3-butanediol (butanediol) when the illustrated secondary alcohol dehydrogenases are expressed in the pathway illustrated in FIG. 15 are shown. Data are mean±s.d. (n=3).

[0038] FIG. 17 illustrates how expression of specific proteins in the pathway described in FIG. 15 can control butanediol:hydroxybutanone ratios through pathway design. The production titers of 4-hydroxy-2-butanone (hydroxybutanone) and 1,3-butanediol (butanediol) when the illustrated proteins are expressed in the pathway illustrated in FIG. 15 are shown. Data are mean±s.d. (n=3).

### DETAILED DESCRIPTION

[0039] The following description is presented to enable a person of ordinary skill in the art to make and use the various embodiments. Descriptions of specific devices, techniques, and applications are provided only as examples. Various modifications to the examples described herein will be readily apparent to those of ordinary skill in the art, and the general principles defined herein may be applied to other examples and applications without departing from the spirit and scope of the various embodiments. Thus, the various embodiments are not intended to be limited to the examples described herein and shown, but are to be accorded the scope consistent with the claims.

[0040] The present disclosure relates generally to the production of alcohols, and more specifically to biological platforms for the production of alcohols using monofunctional aldehyde dehydrogenases and monofunctional alcohol dehydrogenases.

[0041] The present disclosure is based, at least in part, on Applicants discovery that monofunctional aldehyde dehydrogenases and monofunctional alcohol dehydrogenases can be used to produce various alcohols in host cells. Previously constructed biosynthetic pathways for the production of alcohols have used bifunctional aldehyde/alcohol dehydrogenases (i.e. a single enzyme that has both aldehyde dehydrogenase activity and alcohol dehydrogenase activity). Monofunctional aldehyde dehydrogenases and monofunctional alcohol dehydrogenases may differ from bifunctional aldehyde/alcohol dehydrogenases in that the monofunctional enzymes do not have both aldehyde dehydrogenase activity and alcohol dehydrogenase activity, but instead have only one of the respective aldehyde dehydrogenase or alcohol dehydrogenase enzymatic activities. A monofunctional aldehyde dehydrogenase may include, for example, an enzyme that has aldehyde dehydrogenase activity and no detectable alcohol dehydrogenase activity. A monofunctional alcohol dehydrogenase may include, for example, an enzyme that has alcohol dehydrogenase activity and no detectable aldehyde dehydrogenase activity. In host cells that contain a nucleic acid that encodes a monofunctional aldehyde dehydrogenase and a nucleic acid that encodes a monofunctional alcohol dehydrogenase, the monofunctional aldehyde dehydrogenase and the monofunctional alcohol dehydrogenase are encoded as separate polypeptides.

[0042] Without wishing to be bound by theory, it was thought that the mechanism for a bifunctional aldehyde/alcohol dehydrogenase enzyme as described above involved shuttling the product formed by the aldehyde dehydrogenase portion of the enzyme directly to the alcohol dehydrogenase portion of the enzyme. Prior to this discovery, and without wishing to be bound by theory, it was thought that a high-flux fermentation pathway that released a volatile or reactive intermediate, as could be the case if monofunctional enzymes were used, would both limit the yield of the pathway and prove toxic to the host cell.

[0043] However, Applicants have shown that host cells expressing a monofunctional aldehyde dehydrogenase and a monofunctional alcohol dehydrogenase are able to produce and accumulate alcohols such as butanol, for example, with the added benefit of limited production of ethanol, which is an undesirable side product. Further, the approach using monofunctional aldehyde dehydrogenases and monofunctional alcohol dehydrogenases allows for unique combinations of these monofunctional enzymes to be tailored for the production of particular alcohols.

[0044] In some embodiments, the methods and compositions as described herein involve a recombinant host cell that facilitates the production of an alcohol from an acyl-CoA, where the host cell includes: a first nucleic acid which encodes a polypeptide involved in the stepwise conversion of an acyl-CoA to a substrate for a monofunctional aldehyde dehydrogenase, a second nucleic acid which encodes a monofunctional aldehyde dehydrogenase, and a third nucleic acid which encodes a monofunctional alcohol dehydrogenase, where at least one of the first nucleic acid, the second nucleic acid, or the third nucleic acid is a recombinant nucleic acid. In some embodiments, at least two of the first nucleic acid, the second nucleic acid, and the third nucleic acid are separate nucleic acids (e.g. are located on separate plasmids in a host cell, or are separately encoded on the same plasmid).

[0045] Exemplary recombinant nucleic acids that encode a polypeptide involved in the stepwise conversion of an acyl-CoA to a substrate for a monofunctional aldehyde dehydrogenase which are suitable for use in the methods and compositions described herein include those which encode, for example, an acetoacetyl-CoA thiolase, a 3-hydroxybutyryl-CoA, a crotonase, and a trans-enoyl-CoA reductase. These polypeptides are described in more detail herein below.

[0046] Alcohols suitable for production from the recombinant host cells as described herein include, for example, C4 alcohols. Exemplary alcohols include saturated alcohols such as, for example n-butanol; unsaturated alcohols such as, for example, crotyl alcohol; diols such as, for example 1,3-butanediol; and the like. Typically, the alcohol is a C4 alcohol such as, for example, n-butanol, crotyl alcohol, 1,3-butanediol, and the like.

[0047] In other embodiments, recombinant host cells as described herein are capable of producing a C4 alcohol where the host cell contains a nucleic acid encoding an acetoacetyl-CoA thiolase, a nucleic acid encoding a 3-hydroxybutyryl-CoA dehydrogenase, a nucleic acid encoding a crotonase, a nucleic acid encoding a trans-enoyl-CoA reductase, a nucleic acid encoding a monofunctional aldehyde dehydrogenase, and a nucleic acid encoding a monofunctional alcohol dehydrogenase, where one or more of the nucleic acids is a recombinant nucleic acid. In some of these embodiments, at least two of the nucleic acids are recombinant or heterologous. In other embodiments, at least three, at least four, at least five, and in some instances all six of the nucleic acids are recombinant or heterologous. In some embodiments, the nucleic acid encoding the monofunctional aldehyde dehydrogenase and/or the nucleic acid encoding the monofunctional alcohol dehydrogenase is/are recombinant or heterologous.

[0048] In some embodiments, recombinant host cells as described herein are capable of producing n-butanol where the host cell contains a nucleic acid encoding an acetoacetyl-CoA thiolase capable of catalyzing the conversion of acetyl-CoA to acetoacetyl-CoA, a nucleic acid encoding a 3-hydroxybutyryl-CoA dehydrogenase capable of catalyzing the conversion of acetoacetyl-CoA to 3-hydroxybutyryl-CoA, a nucleic acid encoding a crotonase capable of catalyzing the conversion of 3-hydroxybutyryl-CoA to crotonyl-CoA, a nucleic acid encoding a trans-enoyl-CoA reductase capable of catalyzing the conversion of crotonyl-CoA to butyryl-CoA, a nucleic acid encoding a monofunctional aldehyde dehydrogenase capable of catalyzing the conversion of butyryl-CoA to butyraldehyde, and a nucleic acid encoding a monofunctional alcohol dehydrogenase capable of catalyzing the conversion of butyraldehyde to n-butanol, where one or more of the nucleic acids is a recombinant nucleic acid. In some of these embodiments, at least two of the nucleic acids are recombinant. In other embodiments, at least three, at least four, at least five, and in some instances all six of the nucleic acids are recombinant. In some embodiments, the nucleic acid encoding the monofunctional aldehyde dehydrogenase and/or the nucleic acid encoding the monofunctional alcohol dehydrogenase is/are recombinant or heterologous.

[0049] In some embodiments, recombinant host cells of the present disclosure are capable of producing crotyl alcohol where the host cell contains a nucleic acid encoding an acetoacetyl-CoA thiolase capable of catalyzing the conversion of acetyl-CoA to acetoacetyl-CoA, a nucleic acid encoding a 3-hydroxybutyryl-CoA dehydrogenase capable of catalyzing the conversion of acetoacetyl-CoA to 3-hydroxybutyryl-CoA, a nucleic acid encoding a crotonase capable of catalyzing the conversion of 3-hydroxybutyryl-CoA to crotonyl-CoA, a nucleic acid encoding a monofunctional aldehyde dehydrogenase capable of catalyzing the conversion of crotonyl-CoA to crotonaldehyde, and a nucleic acid encoding a monofunctional alcohol dehydrogenase capable of catalyzing the conversion of crotonaldehyde to crotyl alcohol, where one or more of the nucleic acids is a recombinant nucleic acid. In some of these embodiments, at least two of the nucleic acids are recombinant. In other embodiments, at least three, at least four, and in some instances all five of the nucleic acids are recombinant. In some embodiments, the nucleic acid encoding the monofunctional aldehyde dehydrogenase and/or the nucleic acid encoding the monofunctional alcohol dehydrogenase is/are recombinant or heterologous.

[0050] In some embodiments, recombinant host cells of the present disclosure are capable of producing 1,3-butanediol where the host cell contains a nucleic acid encoding an acetoacetyl-CoA thiolase capable of catalyzing the conversion of acetyl-CoA to acetoacetyl-CoA, a nucleic acid encoding a 3-hydroxybutyryl-CoA dehydrogenase capable of catalyzing the conversion of acetoacetyl-CoA to 3-hydroxybutyryl-CoA, a nucleic acid encoding a monofunctional aldehyde dehydrogenase capable of catalyzing the conversion of 3-hydroxybutyryl-CoA to 3-hydroxybutyraldehyde, and a nucleic acid encoding a monofunctional alcohol dehydrogenase capable of catalyzing the conversion of 3-hydroxybutyraldehyde to 1,3-butanediol, where one or more of the nucleic acids is recombinant or heterologous. In some of these embodiments, at least two of the nucleic acids are recombinant or heterologous. In other embodiments, at least three, and in some instances all four of the nucleic acids are recombinant or heterologous. In some embodiments, the nucleic acid encoding the monofunctional aldehyde dehydrogenase and/or the nucleic acid encoding the monofunctional alcohol dehydrogenase is/are recombinant or heterologous.

[0051] Recombinant host cells of the present disclosure may contain one or more nucleic acids encoding polypeptides such as, for example, any one of SEQ ID NOs: 1-154 and/or homologs thereof, and any one of SEQ ID NO: 250-266 and/or homologs thereof. Recombinant host cells of the present disclosure may contain one or more nucleic acids such as, for example, any one of SEQ ID NOs: 155-249, and/or homologs thereof.

[0052] The use of the terms “a,” “an,” and “the,” and similar referents in the context of describing the disclosure (especially in the context of the following claims) are to be construed to cover both the singular and the plural, unless otherwise indicated herein or clearly contradicted by context. The terms “comprising,” “having,” “including,” and “containing” are to be construed as open-ended terms (i.e., meaning “including, but not limited to,”) unless otherwise noted. Recitation of ranges of values herein are merely intended to serve as a shorthand method of referring individually to each separate value falling within the range, unless otherwise indicated herein, and each separate value is incorporated into the specification as if it were individually recited herein. For example, if the range 10-15 is disclosed, then 11, 12, 13, and 14 are also disclosed. All methods described herein can be performed in any suitable order unless otherwise indicated herein or otherwise clearly contradicted by context. The use of any and all examples, or exemplary language (e.g., “such as”) provided herein, is intended merely to better illuminate the embodiments of the disclosure and does not pose a limitation on the scope of the disclosure unless otherwise claimed. No language in the specification should be construed as indicating any non-claimed element as essential to the practice of the embodiments of the disclosure.

[0053] Reference to “about” a value or parameter herein refers to the usual error range for the respective value readily known to the skilled person in this technical field. Reference to “about” a value or parameter herein includes (and describes) aspects that are directed to that value or parameter per se. For example, description referring to “about X” includes description of “X.”

[0054] It is understood that aspects and embodiments of the present disclosure described herein include “comprising,” “consisting,” and “consisting essentially of” aspects and embodiments.

[0055] It is to be understood that one, some, or all of the properties of the various embodiments described herein may be combined to form other embodiments of the present disclosure. These and other aspects of the present disclosure will become apparent to one of skill in the art. These and other embodiments of the present disclosure are further described by the detailed description that follows.

### Polypeptides of the Present Disclosure

[0056] As described above, recombinant host cells of the present disclosure are engineered to contain one or more nucleic acids that encode polypeptides that are involved with and/or directly contribute to the biosynthesis of the alcohols described herein. These polypeptides, and the nucleic acids that encode them, are described in more detail below.

[0057] As used herein, a “polypeptide” is an amino acid sequence including a plurality of consecutive polymerized amino acid residues (e.g., at least about 15 consecutive polymerized amino acid residues). As used herein, “polypeptide” refers to an amino acid sequence, oligopeptide, peptide, protein, or portions thereof, and the terms “polypeptide” and “protein” are used interchangeably.

[0058] Proteins Involved in the Generation of Coenzyme a (CoA)

[0059] Alcohols of the present disclosure may be produced by a recombinant host cell via the stepwise conversion of the compound acetyl-CoA to an alcohol such as, for example, a C4 alcohol. As such, coenzyme A (CoA) may be used as a starting substrate in the production of acetyl-CoA. CoA may be endogenously present in the host cells or proteins involved in the generation of CoA may be recombinantly expressed in host cells such that the cells produce CoA. In host cells where CoA is endogenously present, various proteins may be modified and/or recombinantly expressed in the host cell such that the concentration of CoA in the host cell is modified (e.g. increased).

[0060] Various proteins are involved in the biosynthesis of coenzyme A. Proteins involved in the biosynthesis of CoA may be endogenously present or recombinantly expressed in a host cell of the present disclosure. Host cells of the present disclosure may contain, for example, a nucleic acid encoding a pantothenate kinase capable of catalyzing the conversion of pantothenate to 4′-phosphopantothenate. Pantothenate kinase may be derived from E. coli, or the pantothenate kinase may be PanK/CoaA or CoaX, for example. Host cells of the present disclosure may also contain, for example, a nucleic acid encoding a phosphopantothenoylcysteine synthetase capable of catalyzing the conversion of 4′-phosphopantothenate to 4′-phosphopantothenoylcysteine. Phosphopantothenoylcysteine synthetase may be derived from E. coli, or the phosphopantothenoylcysteine synthetase may be Ppcs or CoaB, for example. Host cells of the present disclosure may also contain, for example, a nucleic acid encoding a phosphopantothenonylcysteine decarboxylase capable of catalyzing the conversion of 4′-phosphopantothenoylcysteine to 4′-phosphopantetheine. Phosphopantothenonylcysteine decarboxylase may be derived from E. coli, or the phosphopantothenonylcysteine decarboxylase may be Ppcdc or CoaC, for example. Host cells of the present disclosure may also contain, for example, a nucleic acid encoding a phosphopantetheine adenylyl transferase capable of catalyzing the transfer of an adenylyl group from ATP to 4′-phosphopantetheine. Phosphopantetheine adenylyl transferase may be derived from E. coli, or the phosphopantetheine adenylyl transferase may be Ppat or CoaD, for example. Host cells of the present disclosure may also contain, for example, a nucleic acid encoding a dephosphocoenzyme A kinase capable of catalyzing the phosphorylation of dephospho-CoA. Dephosphocoenzyme A kinase may be derived from E. coli, or the dephosphocoenzyme A kinase may be CoaE, for example.

[0061] Recombinant nucleic acids encoding pantothenate kinase, phosphopantothenoylcysteine synthetase, phosphopantothenonylcysteine decarboxylase, phosphopantetheine adenylyl transferase, or dephosphocoenzyme A kinase may be derived from various prokaryotic organisms including, for example, proteobacterial, archaebacterial, bacteroidal, enterobacterial, spirochetal organisms. These nucleic acids may also be derived from various eukaryotic organisms including, for example, mammalian, insect, fungal and yeast organisms. The nucleic acids may be codon optimized to reflect the typical codon usage of the host cell, as described in more detail below.

[0062] Proteins Involved in the Generation of Acetyl-CoA

[0063] As described above, CoA may be endogenously present in the host cells of the present disclosure, or proteins involved in the generation of CoA may be recombinantly expressed in host cells such that the cells produce CoA. To produce acetyl-CoA, recombinant cells of the present disclosure may contain nucleic acids that encode at least one recombinant pathway for the production of acetyl-CoA. Acetyl-CoA can be generated from the glycolysis product pyruvate by way of, for example, a pyruvate dehydrogenase complex (PDHc), a pyruvate formate oxidoreductase (PFOR), the combined activities of a pyruvate formate lyase and a formate dehydrogenase (PFL-FDH), or a pyruvate dehydrogenase bypass pathway (PDH bypass). PDH bypass pathways may include, for example, a pyruvate dehydrogenase (PDH) in combination with an acylating aldehyde dehydrogenase or a non-acylating aldehyde dehydrogenase and an acetyl-CoA synthetase.

[0064] Recombinant host cells containing a pathway for the production of acetyl-CoA may contain, for example, recombinant polynucleotides encoding a pyruvate dehydrogenase complex (PDHc). In some embodiments, a pyruvate dehydrogenase complex is overexpressed in a host cell. In some embodiments, the PDH is Pdh from E. coli.

[0065] Recombinant host cells containing a pathway for the production of acetyl-CoA may contain, for example, recombinant or heterologous polynucleotides encoding a pyruvate formate lyase (PFL) and a formate dehydrogenase (FDH). Recombinant host cells containing a pathway for the production of acetyl-CoA may contain, for example, a recombinant polynucleotide encoding a pyruvate formate oxidoreductase complex (PFOR). In some embodiments, PFOR includes a pyruvate:flavodoxin/ferredoxin-oxidoreductase, a flavodoxin-NADP reductase, a ferredoxin, and at least one flavodoxin. In some embodiments, the recombinant proteins that compose the PFOR complex include YdbK, Fpr, Fdx, and FldA, or FldB from E. coli.

[0066] Recombinant host cells containing a pathway for the production of acetyl-CoA may contain, for example, one or more recombinant or heterologous nucleic acids encoding a pyruvate dehydrogenase bypass (PDH bypass). In some embodiments, the PDH bypass includes recombinant nucleic acids encoding a pyruvate decarboxylase (PDC). In some embodiments, the PDH bypass includes recombinant nucleic acids encoding a non-acylating aldehyde dehydrogenase. In some embodiments, the PDH bypass includes recombinant nucleic acids encoding an acetyl-CoA synthetase (ACS). In some embodiments, the PDHc bypass includes recombinant nucleic acids encoding a PDC, a non-acylating aldehyde dehydrogenase, and an ACS. In some embodiments, the PDH bypass includes recombinant nucleic acids encoding an acetylating aldehyde dehydrogenase. In some embodiments, the PDH bypass includes recombinant nucleic acids encoding a PDC and an acylating aldehyde dehydrogenase. In some embodiments, the PDH bypass includes recombinant nucleic acids encoding a PDC from Z. mobitilis and an acylating aldehyde dehydrogenase from E. coli. In some embodiments, the PDHc bypass contains recombinant nucleic acids encoding Pdc from Z. mobitilis and EutEA from E. coli.

[0067] Recombinant nucleic acids encoding PDHc, PFOR, PFL, FDH, acylating aldehyde dehydrogenase and non-acylating aldehyde dehydrogenase enzymes may be derived from various prokaryotic organisms including, for example, proteobacterial, archaebacterial, bacteroidal, enterobacterial, spirochetal organisms, as well as from various eukaryotic organisms including, for example, mammalian, insect, fungal and yeast organisms. The nucleic acids may be codon optimized to reflect the typical codon usage of the host cell, as described in more detail below. Exemplary nucleic acids include, for example, E. coli Pdh, which is composed of the three genes aceE, aceF, and lpdA; the E. faecalis Pdh, which is composed of the four genes pdhA, pdhB, aceF, and lpdA; the E. coli PFOR genes ydbK, fpr, fdx, fldA, and fldB; the Z. mobilis pdc gene; and the E. coli acetylating aldehyde dehydrogenase gene eutE. In some embodiments, the aceE protein has NCBI GenInfo Identifier Number GI 445925965 (SEQ ID NO: 38). In some embodiments, the aceF protein has NCBI GenInfo Identifier Number GI 446886262 (SEQ ID NO: 39). In some embodiments, the lpd protein has NCBI GenInfo Identifier Number GI 485653524 (SEQ ID NO: 40).

[0068] Acetoacetyl-CoA Thiolase

[0069] Certain aspects of the present disclosure relate to a recombinant host cell that contains a nucleic acid that encodes an acetoacetyl-CoA thiolase polypeptide, where the host cell may be used in the production of an alcohol in host cells. Acetoacetyl-CoA thiolase polypeptides are generally understood to be enzymes having E.C. 2.3.1.16 activity and that can catalyze the following reversible reaction: acyl-CoA+acetyl-CoA=CoA+3-oxoacyl-CoA. The acetoacetyl-CoA thiolase-encoding nucleic acids employed in the methods and compositions described herein may encode any of a variety of acetoacetyl-CoA thiolase polypeptides that are known in the art. The acetoacetyl-CoA thiolase polypeptide may be endogenously present or encoded by a heterologous polynucleotide (e.g., recombinantly expressed) in a host cell of the present disclosure. Recombinant nucleic acids encoding an acetoacetyl-CoA thiolase polypeptide may be derived from various prokaryotic organisms including, for example, proteobacterial, archaebacterial, bacteroidal, enterobacterial, spirochetal organisms, and various eukaryotic organisms including, for example, mammalian, insect, fungal and yeast organisms. The nucleic acids may be codon optimized to reflect the typical codon usage of the host cell, as described in more detail below. Examples of acetoacetyl-CoA thiolase polypeptides encoded by these nucleic acids include Ralstonia eutrophus acetoacetyl-CoA thiolase/synthase phaA and related enzymes from cells that make polyhydroxyalkanoates, C. acetobutylicum acetoacetyl-CoA thiolase/synthase thl, and E. coli acetoacetyl-CoA thiolase/synthase atoB. In some embodiments, the phaA protein has NCBI GenInfo Identifier Number GI 498509665 (SEQ ID NO: 33).

[0070] 3-Hydroxybutyryl-CoA Dehydrogenase

[0071] Certain aspects of the present disclosure relate to a recombinant host cell that contains a nucleic acid that encodes a 3-hydroxybutyryl-CoA dehydrogenase polypeptide, where the host cell may be used in the production of an alcohol in host cells. 3-hydroxybutyryl-CoA dehydrogenase polypeptides are generally understood to be enzymes having E.C. 1.1.1.157 activity and that can catalyze, for example, the following reversible reaction: 3-hydroxybutanoyl-CoA+NADP+=3-acetoacetyl-CoA+NADPH+H+. The 3-hydroxybutanoyl-CoA dehydrogenase-encoding nucleic acids employed in the methods and compositions described herein may encode any of a variety of 3-hydroxybutyryl-CoA dehydrogenase polypeptides that are known in the art. The 3-hydroxybutyryl-CoA dehydrogenase polypeptide may be endogenously present or encoded by a heterologous polynucleotide (e.g., recombinantly expressed) in a host cell of the present disclosure. Recombinant nucleic acids encoding the 3-hydroxybutyryl-CoA dehydrogenase polypeptide may be derived from various prokaryotic organisms including, for example, proteobacterial, archaebacterial, bacteroidal, enterobacterial, spirochetal organisms, and various eukaryotic organisms including, for example, mammalian, insect, fungal and yeast organisms. The nucleic acids may be codon optimized to reflect the typical codon usage of the host cell, as described in more detail below. Examples of 3-hydroxybutyryl-CoA dehydrogenase polypeptides encoded by these nucleic acids include the R. eutrophus 3-hydroxybutyryl-CoA dehydrogenase phaB, the C. acetobutylicum acetoacetyl-CoA reductase hbd, and the 3-hydroxybutyryl-CoA dehydrogenase from Aeromonas caviae, hbd. In some embodiments, the phaB protein has NCBI GenInfo Identifier Number GI 113867453 (SEQ ID NO: 34). In some embodiments, the hbd protein has NCBI GenInfo Identifier Number GI 499268602 (SEQ ID NO: 35).

[0072] Crotonase

[0073] Certain aspects of the present disclosure relate to a recombinant host cell that contains a nucleic acid that encodes a crotonase polypeptide, where the host cell may be used in the production of an alcohol in host cells. Crotonase polypeptides are generally understood to be enzymes having E.C. 4.2.1.17 activity and that can catalyze, for example, the following reversible reaction: 3-hydroxyacyl-CoA=trans-2(or 3)-enoyl-CoA+H₂O. The crotonase-encoding nucleic acids employed in the methods and compositions described herein may encode any of a variety of crotonase polypeptides that are known in the art. The crotonase polypeptide may be endogenously present or encoded by a heterologous polynucleotide (e.g., recombinantly expressed) in a host cell of the present disclosure. Recombinant nucleic acid sequences encoding the crotonase polypeptide may be derived from various prokaryotic organisms including, for example, proteobacterial, archaebacterial, bacteroidal, enterobacterial, spirochetal organisms, and various eukaryotic organisms including, for example, mammalian, insect, fungal and yeast organisms. The nucleic acids may be codon optimized to reflect the typical codon usage of the host cell, as described in more detail below. Examples of crotonase polypeptides encoded by these nucleic acids include the C. acetobutylicum crotonase crt, and the A. cavaie crotonase phaJ. In some embodiments, the crt protein has NCBI GenInfo Identifier Number GI 15895969 (SEQ ID NO: 36).

[0074] Trans-Enoyl-CoA Reductase

[0075] Certain aspects of the present disclosure relate to the use of a recombinant host cell that contains a nucleic acid that encodes a trans-enoyl-CoA reductase polypeptide, where the host cell may be used in the production of an alcohol in host cells. Trans-enoyl-CoA reductase polypeptides are generally understood to be enzymes having E. C. 1.3.1.38 activity and that can catalyze, for example, the following reversible reaction: acyl-CoA+NADP+=trans-2,3-dehydroacyl-CoA+NADPH+H+. The trans-enoyl-CoA reductase-encoding nucleic acids employed in the methods and compositions described herein may encode any of a variety of trans-enoyl-CoA reductase polypeptides that are known in the art. The trans-enoyl-CoA reductase polypeptide may be endogenously present or encoded by a heterologous polynucleotide (e.g., recombinantly expressed) in a host cell of the present disclosure. Recombinant nucleic acids encoding the trans-enoyl-CoA reductase polypeptide may be derived from various prokaryotic organisms including, for example, proteobacterial, archaebacterial, bacteroidal, enterobacterial, spirochetal organisms, and various eukaryotic organisms including, for example, mammalian, insect, fungal and yeast organisms. The nucleic acids may be codon optimized to reflect the typical codon usage of the host cell, as described in more detail below. Examples of trans-enoyl-CoA reductase polypeptides encoded by these nucleic acids include trans-enoyl-CoA reductase polypeptides from T. denticola, E. gracilis, Burkholderia mallei, Burkholderia pseudomallei, Burkholderia cepacia, Methylobacillus flagellatus, Xylella fastidiosa, Xanthomonas campestris, Xanthomonas cryzae, Pseudomonas putida, Pseudomonas entomophila, Marinomonas sp., Psychromonas ingrahmii, Vibrio alginolyticus, Vibrio parahaemolyticus, Vibrio splendidus, Vibrio sp., Shewanella frigidimarina, Oceanospirillum sp., Aeromonas hydrophila subsp., Serratiae proteamaculans, Saccharophagus degradans, Colwellia psychrerythraea, Reine kea sp., Idiomarina loihiensis, Streptomyces avermitilis, Coxiella burnetii Dugway, Polaribacter irgensii, Flavobacterium johnsoniae, Cytophaga hutchisonii, E. coli, R. eutrophus, A. caviae, and C. acetobutylicum. In some embodiments, the ter protein has NCBI GenInfo Identifier Number GI 488758537 (SEQ ID NO: 37).

[0076] Monofunctional Aldehyde Dehydrogenase

[0077] Certain aspects of the present disclosure relate to a recombinant host cell that contains a nucleic acid that encodes a monofunctional aldehyde dehydrogenase polypeptide for use in the production of an alcohol in host cells. Aldehyde dehydrogenase polypeptides are generally understood to be enzymes having E. C. 1.2.1.10 activity. Aldehyde dehydrogenase polypeptides of the present disclosure may be used to catalyze the conversion of a CoA-containing molecule to an aldehyde, using NADH or NADPH as a cofactor. A monofunctional aldehyde dehydrogenase polypeptide of the present disclosure may be used to catalyze the conversion of butyryl-CoA to butyraldehyde. A monofunctional aldehyde dehydrogenase polypeptide of the present disclosure may be used to catalyze the conversion of crotonyl-CoA to crotonaldehyde. A monofunctional aldehyde dehydrogenase polypeptide of the present disclosure may be used to catalyze the conversion of 3-hydroxybutyryl-CoA to 3-hydroxybutyraldehyde. In certain embodiments, a host cell comprises a heterologous polynucleotide encoding a polypeptide having monofunctional aldehyde dehydrogenase activity.

[0078] The monofunctional aldehyde dehydrogenase-encoding nucleic acid may encode any of a variety of aldehyde dehydrogenases that are known in the art. The nucleic acid may be codon optimized to reflect the typical codon usage of the host cell, as described in more detail below. The encoded aldehyde dehydrogenase may be, for example, an aldehyde dehydrogenase having NCBI GenInfo Identifier Number GI 4884855 (SEQ ID NO: 1), GI 26250354 (SEQ ID NO: 2), GI 31075383 (SEQ ID NO: 3), GI 149190407 (SEQ ID NO: 4), GI 154503198 (SEQ ID NO: 5), GI 160942363 (SEQ ID NO: 6), GI 187934965 (SEQ ID NO: 7), GI 189310620 (SEQ ID NO: 8), GI 251780016 (SEQ ID NO: 9), GI 255526882 (SEQ ID NO: 10), GI 302386203 (SEQ ID NO: 11), GI 312110932 (SEQ ID NO: 12), GI 359413662 (SEQ ID NO: 13), GI 371960349 (SEQ ID NO: 14), GI 373496187 (SEQ ID NO: 15), and GI 150018649 (SEQ ID NO: 16).

[0079] Monofunctional Alcohol Dehydrogenase

[0080] Certain aspects of the present disclosure relate to a recombinant host cell that contains a nucleic acid that encodes a monofunctional alcohol dehydrogenase polypeptide, where the host cell may be used in the production of an alcohol. Alcohol dehydrogenase polypeptides are generally understood to be enzymes having E. C. 1.1.1.1 activity. Alcohol dehydrogenase polypeptides of the present disclosure may be used to catalyze the conversion of an aldehyde into an alcohol, using NADH or NADPH as a cofactor. A monofunctional alcohol dehydrogenase polypeptide of the present disclosure may be used to catalyze the conversion of butyraldehyde to n-butanol. A monofunctional alcohol dehydrogenase polypeptide of the present disclosure may be used to catalyze the conversion of crotonaldehyde to crotyl alcohol. A monofunctional alcohol dehydrogenase polypeptide of the present disclosure may be used to catalyze the conversion of 3-hydroxybutyraldehyde to 1,3-butanediol. In certain embodiments, a host cell comprises a heterologous polynucleotide encoding a polypeptide having monofunctional alcohol dehydrogenase activity.

[0081] The monofunctional alcohol dehydrogenase-encoding nucleic acid may encode any of a variety of alcohol dehydrogenases that are known in the art. The nucleic acid may be codon optimized to reflect the typical codon usage of the host cell, as described in more detail below. The encoded alcohol dehydrogenase may be, for example, an alcohol dehydrogenase having UniProt ID A0RQF7_CAMFF (SEQ ID NO: 17), G5F136_9ACTN (SEQ ID NO: 18), B1C7G7_9FIRM (SEQ ID NO: 19), YUGK_BACSU (SEQ ID NO: 20), A8SGI9_9FIRM (SEQ ID NO: 21), E2SQ66_9FIRM (SEQ ID NO: 22), E1QYZ8_OLSUV (SEQ ID NO: 23), F5X0G1_STRG1 (SEQ ID NO: 24), E6W4G5_DESIS (SEQ ID NO: 25), B1C4Z8_9FIRM (SEQ ID NO: 26), G4L3E3_TETHN (SEQ ID NO: 27), E8LLW8_9GAMM (SEQ ID NO: 28), E4RKV2_HALHG (SEQ ID NO: 29), Q15G22_CITFR (SEQ ID NO: 30), AOPY50_CLONN (SEQ ID NO: 31), and Q3A1K9_PELCD (SEQ ID NO: 32).

[0082] Certain aspects of the present disclosure also relate to a recombinant host cell that contains a nucleic acid that encodes a monofunctional secondary alcohol dehydrogenase polypeptide, where the host cell may be used in the production of an alcohol. Secondary alcohol dehydrogenase polypeptides are generally understood to be enzymes having E. C. 1.1.1.1 activity. Secondary alcohol dehydrogenases of the present disclosure may be used e.g. in the conversion of 4-hydroxy-2-butanone to 1,3-butanediol. In certain embodiments, a host cell comprises a heterologous polynucleotide encoding a polypeptide having monofunctional secondary alcohol dehydrogenase activity.

[0083] The monofunctional secondary alcohol dehydrogenase-encoding nucleic acid may encode any of a variety of secondary alcohol dehydrogenases that are known in the art. The nucleic acid may be codon optimized to reflect the typical codon usage of the host cell, as described in more detail below. The encoded secondary alcohol dehydrogenase may be, for example, a secondary alcohol dehydrogenase selected from Table 5 herein, including SEQ ID NOs: 250-266.

[0084] AdhE2 Variants

[0085] Certain aspects of the present disclosure relate to a recombinant host cell that contains a nucleic acid that encodes a variant of a wild-type AdhE2 polypeptide. Accordingly, further provided herein are variants of a wild-type AdhE2 polypeptide (SEQ ID NO: 41). Variants of a wild-type AdhE2 polypeptide may include, for example, a polypeptide having the amino acid sequence of any one of SEQ ID NOs: 60-154. Nucleic acids encoding variants of a wild-type AdhE2 polypeptide may include, for example, any one of SEQ ID NO: 155-249.

[0086] Sequence Similarity to Polypeptides of the Disclosure

[0087] Nucleic acids suitable for use in the methods and compositions described herein include those that encode, for example, any known or putative protein involved in the biosynthesis of coenzyme A (CoA), any known or putative protein involved in the biosynthesis of acetyl-CoA, and any known or putative acetoacetyl-CoA thiolase, 3-hydroxybutyryl-CoA dehydrogenase, crotonase, trans-enoyl-CoA reductase, monofunctional aldehyde dehydrogenase, and/or monofunctional alcohol dehydrogenase, also include polypeptides that are homologs and/or orthologs of the polypeptides described herein. Methods for the identification of polypeptides that are homologs of a polypeptide of interest are well-known to one of skill in the art, as described herein.

[0088] In some embodiments, the encoded polypeptides have an amino acid sequence that has at least 10%, at least 15%, at least 20%, at least 25%, at least 30%, at least 35%, at least 40%, at least 45%, at least 50%, at least 55%, at least 60%, at least 65%, at least 70%, at least 75%, at least 80%, at least 85%, at least 90%, at least 95%, at least 98%, at least 99%, or 100% identity to the amino acid sequence of any known or putative polypeptide described herein such as, for example, any known or putative protein involved in the biosynthesis of coenzyme A (CoA), any known or putative protein involved in the biosynthesis of acetyl-CoA, and any known or putative acetoacetyl-CoA thiolase, 3-hydroxybutyryl-CoA dehydrogenase, crotonase, trans-enoyl-CoA reductase, monofunctional aldehyde dehydrogenase, and/or monofunctional alcohol dehydrogenase.

[0089] The polypeptides used in the methods and compositions described herein may include, for example, a polypeptide having an amino acid sequence that has at least 10%, at least 15%, at least 20%, at least 25%, at least 30%, at least 35%, at least 40%, at least 45%, at least 50%, at least 55%, at least 60%, at least 65%, at least 70%, at least 75%, at least 80%, at least 85%, at least 90%, at least 95%, at least 98%, at least 99%, or 100% identity to the amino acid sequence of SEQ ID NO: 1, SEQ ID NO: 2, SEQ ID NO: 3, SEQ ID NO: 4, SEQ ID NO: 5, SEQ ID NO: 6, SEQ ID NO: 7, SEQ ID NO: 8, SEQ ID NO: 9, SEQ ID NO: 10, SEQ ID NO: 11, SEQ ID NO: 12, SEQ ID NO: 13, SEQ ID NO: 14, SEQ ID NO: 15, SEQ ID NO: 16, SEQ ID NO: 17, SEQ ID NO: 18, SEQ ID NO: 19, SEQ ID NO: 20, SEQ ID NO: 21, SEQ ID NO: 22, SEQ ID NO: 23, SEQ ID NO: 24, SEQ ID NO: 25, SEQ ID NO: 26, SEQ ID NO: 27, SEQ ID NO: 28, SEQ ID NO: 29, SEQ ID NO: 30, SEQ ID NO: 31, SEQ ID NO: 32, SEQ ID NO: 33, SEQ ID NO: 34, SEQ ID NO: 35, SEQ ID NO: 36, SEQ ID NO: 37, SEQ ID NO: 38, SEQ ID NO: 39, SEQ ID NO: 40, SEQ ID NO: 41, SEQ ID NO: 42, SEQ ID NO: 43, SEQ ID NO: 44, SEQ ID NO: 45, SEQ ID NO: 46, SEQ ID NO: 47, SEQ ID NO: 48, SEQ ID NO: 49, SEQ ID NO: 50, SEQ ID NO: 51, SEQ ID NO: 52, SEQ ID NO: 53, SEQ ID NO: 54, SEQ ID NO: 55, SEQ ID NO: 56, SEQ ID NO: 57, SEQ ID NO: 58, SEQ ID NO: 59, SEQ ID NO: 60, SEQ ID NO: 61, SEQ ID NO: 62, SEQ ID NO: 63, SEQ ID NO: 64, SEQ ID NO: 65, SEQ ID NO: 66, SEQ ID NO: 67, SEQ ID NO: 68, SEQ ID NO: 69, SEQ ID NO: 70, SEQ ID NO: 71, SEQ ID NO: 72, SEQ ID NO: 73, SEQ ID NO: 74, SEQ ID NO: 75, SEQ ID NO: 76, SEQ ID NO: 77, SEQ ID NO: 78, SEQ ID NO: 79, SEQ ID NO: 80, SEQ ID NO: 81, SEQ ID NO: 82, SEQ ID NO: 83, SEQ ID NO: 84, SEQ ID NO: 85, SEQ ID NO: 86, SEQ ID NO: 87, SEQ ID NO: 88, SEQ ID NO: 89, SEQ ID NO: 90, SEQ ID NO: 91, SEQ ID NO: 92, SEQ ID NO: 93, SEQ ID NO: 94, SEQ ID NO: 95, SEQ ID NO: 96, SEQ ID NO: 97, SEQ ID NO: 98, SEQ ID NO: 99, SEQ ID NO: 100, SEQ ID NO: 101, SEQ ID NO: 102, SEQ ID NO: 103, SEQ ID NO: 104, SEQ ID NO: 105, SEQ ID NO: 106, SEQ ID NO: 107, SEQ ID NO: 108, SEQ ID NO: 109, SEQ ID NO: 110, SEQ ID NO: 111, SEQ ID NO: 112, SEQ ID NO: 113, SEQ ID NO: 114, SEQ ID NO: 115, SEQ ID NO: 116, SEQ ID NO: 117, SEQ ID NO: 118, SEQ ID NO: 119, SEQ ID NO: 120, SEQ ID NO: 121, SEQ ID NO: 122, SEQ ID NO: 123, SEQ ID NO: 124, SEQ ID NO: 125, SEQ ID NO: 126, SEQ ID NO: 127, SEQ ID NO: 128, SEQ ID NO: 129, SEQ ID NO: 130, SEQ ID NO: 131, SEQ ID NO: 132, SEQ ID NO: 133, SEQ ID NO: 134, SEQ ID NO: 135, SEQ ID NO: 136, SEQ ID NO: 137, SEQ ID NO: 138, SEQ ID NO: 139, SEQ ID NO: 140, SEQ ID NO: 141, SEQ ID NO: 142, SEQ ID NO: 143, SEQ ID NO: 144, SEQ ID NO: 145, SEQ ID NO: 146, SEQ ID NO: 147, SEQ ID NO: 148, SEQ ID NO: 149, SEQ ID NO: 150, SEQ ID NO: 151, SEQ ID NO: 152, SEQ ID NO: 153, SEQ ID NO: 154, SEQ ID NO: 250, SEQ ID NO: 251, SEQ ID NO: 252, SEQ ID NO: 253, SEQ ID NO: 254, SEQ ID NO: 255, SEQ ID NO: 256, SEQ ID NO: 257, SEQ ID NO: 258, SEQ ID NO: 259, SEQ ID NO: 260, SEQ ID NO: 261, SEQ ID NO: 262, SEQ ID NO: 263, SEQ ID NO: 264, SEQ ID NO: 265, and/or SEQ ID NO: 266.

[0090] In some embodiments, the encoded polypeptides have at least 10, at least 12, at least 14, at least 16, at least 18, at least 20, at least 25, at least 30, at least 35, at least 40, at least 45, at least 50, at least 55, at least 60, at least 65, at least 70, at least 75, at least 80, at least 85, at least 90, at least 95, at least 100, at least 110, at least 120, at least 130, at least 140, at least 150, at least 160, at least 170, at least 180, at least 190, at least 200, at least 210, at least 220, at least 230, at least 240, or at least 250 consecutive amino acids of any known or putative polypeptide described herein such as, for example, any known or putative protein involved in the biosynthesis of coenzyme A (CoA), any known or putative protein involved in the biosynthesis of acetyl-CoA, and any known or putative acetoacetyl-CoA thiolase, 3-hydroxybutyryl-CoA dehydrogenase, crotonase, trans-enoyl-CoA reductase, monofunctional aldehyde dehydrogenase, and/or monofunctional alcohol dehydrogenase.

[0091] The polypeptides used in the methods and compositions described herein may include, for example, a polypeptide having least 10, at least 12, at least 14, at least 16, at least 18, at least 20, at least 25, at least 30, at least 35, at least 40, at least 45, at least 50, at least 55, at least 60, at least 65, at least 70, at least 75, at least 80, at least 85, at least 90, at least 95, at least 100, at least 110, at least 120, at least 130, at least 140, at least 150, at least 160, at least 170, at least 180, at least 190, at least 200, at least 210, at least 220, at least 230, at least 240, or at least 250 consecutive amino acids of the amino acid sequence of SEQ ID NO: 1, SEQ ID NO: 2, SEQ ID NO: 3, SEQ ID NO: 4, SEQ ID NO: 5, SEQ ID NO: 6, SEQ ID NO: 7, SEQ ID NO: 8, SEQ ID NO: 9, SEQ ID NO: 10, SEQ ID NO: 11, SEQ ID NO: 12, SEQ ID NO: 13, SEQ ID NO: 14, SEQ ID NO: 15, SEQ ID NO: 16, SEQ ID NO: 17, SEQ ID NO: 18, SEQ ID NO: 19, SEQ ID NO: 20, SEQ ID NO: 21, SEQ ID NO: 22, SEQ ID NO: 23, SEQ ID NO: 24, SEQ ID NO: 25, SEQ ID NO: 26, SEQ ID NO: 27, SEQ ID NO: 28, SEQ ID NO: 29, SEQ ID NO: 30, SEQ ID NO: 31, SEQ ID NO: 32, SEQ ID NO: 33, SEQ ID NO: 34, SEQ ID NO: 35, SEQ ID NO: 36, SEQ ID NO: 37, SEQ ID NO: 38, SEQ ID NO: 39, SEQ ID NO: 40, SEQ ID NO: 41, SEQ ID NO: 42, SEQ ID NO: 43, SEQ ID NO: 44, SEQ ID NO: 45, SEQ ID NO: 46, SEQ ID NO: 47, SEQ ID NO: 48, SEQ ID NO: 49, SEQ ID NO: 50, SEQ ID NO: 51, SEQ ID NO: 52, SEQ ID NO: 53, SEQ ID NO: 54, SEQ ID NO: 55, SEQ ID NO: 56, SEQ ID NO: 57, SEQ ID NO: 58, SEQ ID NO: 59, SEQ ID NO: 60, SEQ ID NO: 61, SEQ ID NO: 62, SEQ ID NO: 63, SEQ ID NO: 64, SEQ ID NO: 65, SEQ ID NO: 66, SEQ ID NO: 67, SEQ ID NO: 68, SEQ ID NO: 69, SEQ ID NO: 70, SEQ ID NO: 71, SEQ ID NO: 72, SEQ ID NO: 73, SEQ ID NO: 74, SEQ ID NO: 75, SEQ ID NO: 76, SEQ ID NO: 77, SEQ ID NO: 78, SEQ ID NO: 79, SEQ ID NO: 80, SEQ ID NO: 81, SEQ ID NO: 82, SEQ ID NO: 83, SEQ ID NO: 84, SEQ ID NO: 85, SEQ ID NO: 86, SEQ ID NO: 87, SEQ ID NO: 88, SEQ ID NO: 89, SEQ ID NO: 90, SEQ ID NO: 91, SEQ ID NO: 92, SEQ ID NO: 93, SEQ ID NO: 94, SEQ ID NO: 95, SEQ ID NO: 96, SEQ ID NO: 97, SEQ ID NO: 98, SEQ ID NO: 99, SEQ ID NO: 100, SEQ ID NO: 101, SEQ ID NO: 102, SEQ ID NO: 103, SEQ ID NO: 104, SEQ ID NO: 105, SEQ ID NO: 106, SEQ ID NO: 107, SEQ ID NO: 108, SEQ ID NO: 109, SEQ ID NO: 110, SEQ ID NO: 111, SEQ ID NO: 112, SEQ ID NO: 113, SEQ ID NO: 114, SEQ ID NO: 115, SEQ ID NO: 116, SEQ ID NO: 117, SEQ ID NO: 118, SEQ ID NO: 119, SEQ ID NO: 120, SEQ ID NO: 121, SEQ ID NO: 122, SEQ ID NO: 123, SEQ ID NO: 124, SEQ ID NO: 125, SEQ ID NO: 126, SEQ ID NO: 127, SEQ ID NO: 128, SEQ ID NO: 129, SEQ ID NO: 130, SEQ ID NO: 131, SEQ ID NO: 132, SEQ ID NO: 133, SEQ ID NO: 134, SEQ ID NO: 135, SEQ ID NO: 136, SEQ ID NO: 137, SEQ ID NO: 138, SEQ ID NO: 139, SEQ ID NO: 140, SEQ ID NO: 141, SEQ ID NO: 142, SEQ ID NO: 143, SEQ ID NO: 144, SEQ ID NO: 145, SEQ ID NO: 146, SEQ ID NO: 147, SEQ ID NO: 148, SEQ ID NO: 149, SEQ ID NO: 150, SEQ ID NO: 151, SEQ ID NO: 152, SEQ ID NO: 153, SEQ ID NO: 154, SEQ ID NO: 250, SEQ ID NO: 251, SEQ ID NO: 252, SEQ ID NO: 253, SEQ ID NO: 254, SEQ ID NO: 255, SEQ ID NO: 256, SEQ ID NO: 257, SEQ ID NO: 258, SEQ ID NO: 259, SEQ ID NO: 260, SEQ ID NO: 261, SEQ ID NO: 262, SEQ ID NO: 263, SEQ ID NO: 264, SEQ ID NO: 265, and/or SEQ ID NO: 266.

[0092] The encoded polypeptides that include, for example, any known or putative protein involved in the biosynthesis of coenzyme A (CoA), any known or putative protein involved in the biosynthesis of acetyl-CoA, and any known or putative acetoacetyl-CoA thiolase, 3-hydroxybutyryl-CoA dehydrogenase, crotonase, trans-enoyl-CoA reductase, monofunctional aldehyde dehydrogenase, and/or monofunctional alcohol dehydrogenase, also include polypeptides having various amino acid additions, deletions, or substitutions relative to the native amino acid sequence of a polypeptide of the present disclosure. In some embodiments, polypeptides that are homologs of a polypeptide of the present disclosure contain non-conservative changes of certain amino acids relative to the native sequence of a polypeptide of the present disclosure. In some embodiments, polypeptides that are homologs of a polypeptide of the present disclosure contain conservative changes of certain amino acids relative to the native sequence of a polypeptide of the present disclosure, and thus may be referred to as conservatively modified variants. A conservatively modified variant may include individual substitutions, deletions or additions to a polypeptide sequence which result in the substitution of an amino acid with a chemically similar amino acid. Conservative substitution tables providing functionally similar amino acids are well-known in the art. Such conservatively modified variants are in addition to and do not exclude polymorphic variants, interspecies homologs, and alleles of the disclosure. The following eight groups contain amino acids that are conservative substitutions for one another: 1) Alanine (A), Glycine (G); 2) Aspartic acid (D), Glutamic acid (E); 3) Asparagine (N), Glutamine (Q); 4) Arginine (R), Lysine (K); 5) Isoleucine (I), Leucine (L), Methionine (M), Valine (V); 6) Phenylalanine (F), Tyrosine (Y), Tryptophan (W); 7) Serine (S), Threonine (T); and 8) Cysteine (C), Methionine (M) (see, e.g., Creighton, Proteins (1984)). A modification of an amino acid to produce a chemically similar amino acid may be referred to as an analogous amino acid.

### Polynucleotides Encoding Polypeptides

[0093] As described above, the present disclosure further relates to polynucleotides that encode polypeptides present in the host cells as described herein. For example, polynucleotides encoding any known or putative protein involved in the biosynthesis of coenzyme A (CoA), any known or putative protein involved in the biosynthesis of acetyl-CoA, and any known or putative acetoacetyl-CoA thiolase, 3-hydroxybutyryl-CoA dehydrogenase, crotonase, trans-enoyl-CoA reductase, monofunctional aldehyde dehydrogenase, and/or monofunctional alcohol dehydrogenase as described herein are provided. Methods for determining the relationship between a polypeptide and a polynucleotide that encodes the polypeptide are well-known to one of skill in the art. Similarly, methods of determining the polypeptide sequence encoded by a polynucleotide sequence are well-known to one of skill in the art.

[0094] As used herein, the terms “polynucleotide,” “nucleic acid,” and variations thereof shall be generic to polydeoxyribonucleotides (containing 2-deoxy-D-ribose), to polyribonucleotides (containing D-ribose), to any other type of polynucleotide that is an N-glycoside of a purine or pyrimidine base, and to other polymers containing non-nucleotidic backbones, provided that the polymers contain nucleobases in a configuration that allows for base pairing and base stacking, as found in DNA and RNA. Thus, these terms include known types of nucleic acid sequence modifications, for example, substitution of one or more of the naturally occurring nucleotides with an analog, and inter-nucleotide modifications. As used herein, the symbols for nucleotides and polynucleotides are those recommended by the IUPAC-IUB Commission of Biochemical Nomenclature.

[0095] The nucleic acids employed in the methods and compositions described herein may be prepared by various suitable methods known in the art, including, for example, direct chemical synthesis or cloning. For direct chemical synthesis, formation of a polymer of nucleic acids typically involves sequential addition of 3′-blocked and 5′-blocked nucleotide monomers to the terminal 5′-hydroxyl group of a growing nucleotide chain, where each addition is effected by nucleophilic attack of the terminal 5′-hydroxyl group of the growing chain on the 3′-position of the added monomer, which is typically a phosphorus derivative, such as a phosphotriester, phosphoramidite, or the like. Such methodology is known to those of ordinary skill in the art and is described in the pertinent texts and literature (e.g., in Matteucci et al., (1980) Tetrahedron Lett 21:719-722; U.S. Pat. Nos. 4,500,707; 5,436,327; and 5,700,637). In addition, the desired sequences may be isolated from natural sources by splitting DNA using appropriate restriction enzymes, separating the fragments using gel electrophoresis, and thereafter, recovering the desired polynucleotide sequence from the gel via techniques known to those of ordinary skill in the art, such as utilization of polymerase chain reactions (PCR; e.g., U.S. Pat. No. 4,683,195).

[0096] The nucleic acids employed in the methods and compositions described herein may be codon optimized relative to a parental template for expression in a particular host cell. Cells differ in their usage of particular codons, and codon bias corresponds to relative abundance of particular tRNAs in a given cell type. By altering codons in a sequence so that they are tailored to match with the relative abundance of corresponding tRNAs, it is possible to increase expression of a product (e.g. a polypeptide) from a nucleic acid. Similarly, it is possible to decrease expression by deliberately choosing codons corresponding to rare tRNAs. Thus, codon optimization/deoptimization can provide control over nucleic acid expression in a particular cell type (e.g. bacterial cell, mammalian cell, etc.). Methods of codon optimizing a nucleic acid for tailored expression in a particular cell type are well-known to those of skill in the art.

[0097] A polynucleotide encoding a polypeptide used in the methods and compositions described herein may include, for example, a polynucleotide that encodes a polypeptide having at least 10%, at least 15%, at least 20%, at least 25%, at least 30%, at least 35%, at least 40%, at least 45%, at least 50%, at least 55%, at least 60%, at least 65%, at least 70%, at least 75%, at least 80%, at least 85%, at least 90%, at least 95%, at least 98%, at least 99%, or 100% identity to the amino acid sequence of SEQ ID NO: 1, SEQ ID NO: 2, SEQ ID NO: 3, SEQ ID NO: 4, SEQ ID NO: 5, SEQ ID NO: 6, SEQ ID NO: 7, SEQ ID NO: 8, SEQ ID NO: 9, SEQ ID NO: 10, SEQ ID NO: 11, SEQ ID NO: 12, SEQ ID NO: 13, SEQ ID NO: 14, SEQ ID NO: 15, SEQ ID NO: 16, SEQ ID NO: 17, SEQ ID NO: 18, SEQ ID NO: 19, SEQ ID NO: 20, SEQ ID NO: 21, SEQ ID NO: 22, SEQ ID NO: 23, SEQ ID NO: 24, SEQ ID NO: 25, SEQ ID NO: 26, SEQ ID NO: 27, SEQ ID NO: 28, SEQ ID NO: 29, SEQ ID NO: 30, SEQ ID NO: 31, SEQ ID NO: 32, SEQ ID NO: 33, SEQ ID NO: 34, SEQ ID NO: 35, SEQ ID NO: 36, SEQ ID NO: 37, SEQ ID NO: 38, SEQ ID NO: 39, SEQ ID NO: 40, SEQ ID NO: 41, SEQ ID NO: 42, SEQ ID NO: 43, SEQ ID NO: 44, SEQ ID NO: 45, SEQ ID NO: 46, SEQ ID NO: 47, SEQ ID NO: 48, SEQ ID NO: 49, SEQ ID NO: 50, SEQ ID NO: 51, SEQ ID NO: 52, SEQ ID NO: 53, SEQ ID NO: 54, SEQ ID NO: 55, SEQ ID NO: 56, SEQ ID NO: 57, SEQ ID NO: 58, SEQ ID NO: 59, SEQ ID NO: 60, SEQ ID NO: 61, SEQ ID NO: 62, SEQ ID NO: 63, SEQ ID NO: 64, SEQ ID NO: 65, SEQ ID NO: 66, SEQ ID NO: 67, SEQ ID NO: 68, SEQ ID NO: 69, SEQ ID NO: 70, SEQ ID NO: 71, SEQ ID NO: 72, SEQ ID NO: 73, SEQ ID NO: 74, SEQ ID NO: 75, SEQ ID NO: 76, SEQ ID NO: 77, SEQ ID NO: 78, SEQ ID NO: 79, SEQ ID NO: 80, SEQ ID NO: 81, SEQ ID NO: 82, SEQ ID NO: 83, SEQ ID NO: 84, SEQ ID NO: 85, SEQ ID NO: 86, SEQ ID NO: 87, SEQ ID NO: 88, SEQ ID NO: 89, SEQ ID NO: 90, SEQ ID NO: 91, SEQ ID NO: 92, SEQ ID NO: 93, SEQ ID NO: 94, SEQ ID NO: 95, SEQ ID NO: 96, SEQ ID NO: 97, SEQ ID NO: 98, SEQ ID NO: 99, SEQ ID NO: 100, SEQ ID NO: 101, SEQ ID NO: 102, SEQ ID NO: 103, SEQ ID NO: 104, SEQ ID NO: 105, SEQ ID NO: 106, SEQ ID NO: 107, SEQ ID NO: 108, SEQ ID NO: 109, SEQ ID NO: 110, SEQ ID NO: 111, SEQ ID NO: 112, SEQ ID NO: 113, SEQ ID NO: 114, SEQ ID NO: 115, SEQ ID NO: 116, SEQ ID NO: 117, SEQ ID NO: 118, SEQ ID NO: 119, SEQ ID NO: 120, SEQ ID NO: 121, SEQ ID NO: 122, SEQ ID NO: 123, SEQ ID NO: 124, SEQ ID NO: 125, SEQ ID NO: 126, SEQ ID NO: 127, SEQ ID NO: 128, SEQ ID NO: 129, SEQ ID NO: 130, SEQ ID NO: 131, SEQ ID NO: 132, SEQ ID NO: 133, SEQ ID NO: 134, SEQ ID NO: 135, SEQ ID NO: 136, SEQ ID NO: 137, SEQ ID NO: 138, SEQ ID NO: 139, SEQ ID NO: 140, SEQ ID NO: 141, SEQ ID NO: 142, SEQ ID NO: 143, SEQ ID NO: 144, SEQ ID NO: 145, SEQ ID NO: 146, SEQ ID NO: 147, SEQ ID NO: 148, SEQ ID NO: 149, SEQ ID NO: 150, SEQ ID NO: 151, SEQ ID NO: 152, SEQ ID NO: 153, SEQ ID NO: 154, SEQ ID NO: 250, SEQ ID NO: 251, SEQ ID NO: 252, SEQ ID NO: 253, SEQ ID NO: 254, SEQ ID NO: 255, SEQ ID NO: 256, SEQ ID NO: 257, SEQ ID NO: 258, SEQ ID NO: 259, SEQ ID NO: 260, SEQ ID NO: 261, SEQ ID NO: 262, SEQ ID NO: 263, SEQ ID NO: 264, SEQ ID NO: 265, and/or SEQ ID NO: 266.

[0098] A polynucleotide encoding an AdhE2 variant of the present disclosure may include, for example, a polynucleotide having at least 10%, at least 15%, at least 20%, at least 25%, at least 30%, at least 35%, at least 40%, at least 45%, at least 50%, at least 55%, at least 60%, at least 65%, at least 70%, at least 75%, at least 80%, at least 85%, at least 90%, at least 95%, at least 98%, at least 99%, or 100% identity to the nucleotide sequence of SEQ ID NO: 155, SEQ ID NO: 156, SEQ ID NO: 157, SEQ ID NO: 158, SEQ ID NO: 159, SEQ ID NO: 160, SEQ ID NO: 161, SEQ ID NO: 162, SEQ ID NO: 163, SEQ ID NO: 164, SEQ ID NO: 165, SEQ ID NO: 166, SEQ ID NO: 167, SEQ ID NO: 168, SEQ ID NO: 169, SEQ ID NO: 170, SEQ ID NO: 171, SEQ ID NO: 172, SEQ ID NO: 173, SEQ ID NO: 174, SEQ ID NO: 175, SEQ ID NO: 176, SEQ ID NO: 177, SEQ ID NO: 178, SEQ ID NO: 179, SEQ ID NO: 180, SEQ ID NO: 181, SEQ ID NO: 182, SEQ ID NO: 183, SEQ ID NO: 184, SEQ ID NO: 185, SEQ ID NO: 186, SEQ ID NO: 187, SEQ ID NO: 188, SEQ ID NO: 189, SEQ ID NO: 190, SEQ ID NO: 191, SEQ ID NO: 192, SEQ ID NO: 193, SEQ ID NO: 194, SEQ ID NO: 195, SEQ ID NO: 196, SEQ ID NO: 197, SEQ ID NO: 198, SEQ ID NO: 199, SEQ ID NO: 200, SEQ ID NO: 201, SEQ ID NO: 202, SEQ ID NO: 203, SEQ ID NO: 204, SEQ ID NO: 205, SEQ ID NO: 206, SEQ ID NO: 207, SEQ ID NO: 208, SEQ ID NO: 209, SEQ ID NO: 210, SEQ ID NO: 211, SEQ ID NO: 212, SEQ ID NO: 213, SEQ ID NO: 214, SEQ ID NO: 215, SEQ ID NO: 216, SEQ ID NO: 217, SEQ ID NO: 218, SEQ ID NO: 219, SEQ ID NO: 220, SEQ ID NO: 221, SEQ ID NO: 222, SEQ ID NO: 223, SEQ ID NO: 224, SEQ ID NO: 225, SEQ ID NO: 226, SEQ ID NO: 227, SEQ ID NO: 228, SEQ ID NO: 229, SEQ ID NO: 230, SEQ ID NO: 231, SEQ ID NO: 232, SEQ ID NO: 233, SEQ ID NO: 234, SEQ ID NO: 235, SEQ ID NO: 236, SEQ ID NO: 237, SEQ ID NO: 238, SEQ ID NO: 239, SEQ ID NO: 240, SEQ ID NO: 241, SEQ ID NO: 242, SEQ ID NO: 243, SEQ ID NO: 244, SEQ ID NO: 245, SEQ ID NO: 246, SEQ ID NO: 247, SEQ ID NO: 248, and/or SEQ ID NO: 249.

### Methods of Identifying Sequence Similarity

[0099] As described above, various polynucleotides and/or polypeptides that are similar to the polynucleotides and/or polypeptides as described herein may be used in the compositions and methods as described herein. Various methods are known to those of skill in the art for identifying similar (e.g. homologs, orthologs, paralogs, etc.) polypeptide and/or polynucleotide sequences, including phylogenetic methods, sequence similarity analysis, and hybridization methods.

[0100] Phylogenetic trees may be created for a gene family by using a program such as CLUSTAL (Thompson et al. Nucleic Acids Res. 22: 4673-4680 (1994); Higgins et al. Methods Enzymol 266: 383-402 (1996)) or MEGA (Tamura et al. Mol. Biol. & Evo. 24:1596-1599 (2007)). Once an initial tree for genes from one species is created, potential orthologous sequences can be placed in the phylogenetic tree and their relationships to genes from the species of interest can be determined. Evolutionary relationships may also be inferred using the Neighbor-Joining method (Saitou and Nei, Mol. Biol. & Evo. 4:406-425 (1987)). Homologous sequences may also be identified by a reciprocal BLAST strategy. Evolutionary distances may be computed using the Poisson correction method (Zuckerkandl and Pauling, pp. 97-166 in Evolving Genes and Proteins, edited by V. Bryson and H. J. Vogel. Academic Press, New York (1965)).

[0101] In addition, evolutionary information may be used to predict gene function. Functional predictions of genes can be greatly improved by focusing on how genes became similar in sequence (i.e. by evolutionary processes) rather than on the sequence similarity itself (Eisen, Genome Res. 8: 163-167 (1998)). Many specific examples exist in which gene function has been shown to correlate well with gene phylogeny (Eisen, Genome Res. 8: 163-167 (1998)). By using a phylogenetic analysis, one skilled in the art would recognize that the ability to deduce similar functions conferred by closely-related polypeptides is predictable.

[0102] When a group of related sequences are analyzed using a phylogenetic program such as CLUSTAL, closely related sequences typically cluster together or in the same clade (a group of similar genes). Groups of similar genes can also be identified with pair-wise BLAST analysis (Feng and Doolittle, J. Mol. Evol. 25: 351-360 (1987)). Analysis of groups of similar genes with similar function that fall within one clade can yield sub-sequences that are particular to the clade. These sub-sequences, known as consensus sequences, can not only be used to define the sequences within each clade, but define the functions of these genes; genes within a clade may contain paralogous sequences, or orthologous sequences that share the same function (see also, for example, Mount, Bioinformatics: Sequence and Genome Analysis Cold Spring Harbor Laboratory Press, Cold Spring Harbor, N.Y., page 543 (2001)).

[0103] To find sequences that are homologous to a reference sequence, BLAST nucleotide searches can be performed with the BLASTN program, score=100, wordlength=12, to obtain nucleotide sequences homologous to a nucleotide sequence encoding a protein of the disclosure. BLAST protein searches can be performed with the BLASTX program, score=50, wordlength=3, to obtain amino acid sequences homologous to a protein or polypeptide of the disclosure. To obtain gapped alignments for comparison purposes, Gapped BLAST (in BLAST 2.0) can be utilized as described in Altschul et al. (1997) Nucleic Acids Res. 25:3389. Alternatively, PSI-BLAST (in BLAST 2.0) can be used to perform an iterated search that detects distant relationships between molecules. See Altschul et al. (1997) supra. When utilizing BLAST, Gapped BLAST, or PSI-BLAST, the default parameters of the respective programs (e.g., BLASTN for nucleotide sequences, BLASTX for proteins) can be used.

[0104] Methods for the alignment of sequences and for the analysis of similarity and identity of polypeptide and polynucleotide sequences are well-known in the art.

[0105] As used herein “sequence identity” refers to the percentage of residues that are identical in the same positions in the sequences being analyzed. As used herein “sequence similarity” refers to the percentage of residues that have similar biophysical/biochemical characteristics in the same positions (e.g. charge, size, hydrophobicity) in the sequences being analyzed.

[0106] Methods of alignment of sequences for comparison are well-known in the art, including manual alignment and computer assisted sequence alignment and analysis. This latter approach is a preferred approach in the present disclosure, due to the increased throughput afforded by computer assisted methods. As noted below, a variety of computer programs for performing sequence alignment are available, or can be produced by one of skill.

[0107] The determination of percent sequence identity and/or similarity between any two sequences can be accomplished using a mathematical algorithm. Examples of such mathematical algorithms are the algorithm of Myers and Miller, CABIOS 4:11-17 (1988); the local homology algorithm of Smith et al., Adv. Appl. Math. 2:482 (1981); the homology alignment algorithm of Needleman and Wunsch, J. Mol. Biol. 48:443-453 (1970); the search-for-similarity-method of Pearson and Lipman, Proc. Natl. Acad. Sci. 85:2444-2448 (1988); the algorithm of Karlin and Altschul, Proc. Natl. Acad. Sci. USA 87:2264-2268 (1990), modified as in Karlin and Altschul, Proc. Natl. Acad. Sci. USA 90:5873-5877 (1993).

[0108] Computer implementations of these mathematical algorithms can be utilized for comparison of sequences to determine sequence identity and/or similarity. Such implementations include, for example: CLUSTAL in the PC/Gene program (available from Intelligenetics, Mountain View, Calif.); the AlignX program, version10.3.0 (Invitrogen, Carlsbad, Calif.) and GAP, BESTFIT, BLAST, FASTA, and TFASTA in the Wisconsin Genetics Software Package, Version 8 (available from Genetics Computer Group (GCG), 575 Science Drive, Madison, Wis., USA). Alignments using these programs can be performed using the default parameters. The CLUSTAL program is well described by Higgins et al. Gene 73:237-244 (1988); Higgins et al. CABIOS 5:151-153 (1989); Corpet et al., Nucleic Acids Res. 16:10881-90 (1988); Huang et al. CABIOS 8:155-65 (1992); and Pearson et al., Meth. Mol. Biol. 24:307-331 (1994). The BLAST programs of Altschul et al. J. Mol. Biol. 215:403-410 (1990) are based on the algorithm of Karlin and Altschul (1990) supra.

[0109] Polynucleotides homologous to a reference sequence can be identified by hybridization to each other under stringent or under highly stringent conditions. Single stranded polynucleotides hybridize when they associate based on a variety of well characterized physical-chemical forces, such as hydrogen bonding, solvent exclusion, base stacking and the like. The stringency of a hybridization reflects the degree of sequence identity of the nucleic acids involved, such that the higher the stringency, the more similar are the two polynucleotide strands. Stringency is influenced by a variety of factors, including temperature, salt concentration and composition, organic and non-organic additives, solvents, etc. present in both the hybridization and wash solutions and incubations (and number thereof), as described in more detail in references cited below (e.g., Sambrook et al., Molecular Cloning: A Laboratory Manual, 2nd Ed., Vol. 1-3, Cold Spring Harbor Laboratory, Cold Spring Harbor, N.Y. (“Sambrook”) (1989); Berger and Kimmel, Guide to Molecular Cloning Techniques, Methods in Enzymology, vol. 152 Academic Press, Inc., San Diego, Calif. (“Berger and Kimmel”) (1987); and Anderson and Young, “Quantitative Filter Hybridisation.” In: Hames and Higgins, ed., Nucleic Acid Hybridisation, A Practical Approach. Oxford, TRL Press, 73-111 (1985)).

[0110] Encompassed by the disclosure are polynucleotide sequences that are capable of hybridizing to the disclosed polynucleotide sequences and fragments thereof under various conditions of stringency (see, for example, Wahl and Berger, Methods Enzymol. 152: 399-407 (1987); and Kimmel, Methods Enzymo. 152: 507-511, (1987)). Full length cDNA, homologs, orthologs, and paralogs of polynucleotides of the present disclosure may be identified and isolated using well-known polynucleotide hybridization methods.

### Vectors for Expressing Polynucleotides

[0111] The recombinant polynucleotides employed in the methods and compositions described herein may be incorporated into an expression vector. “Expression vector” or “vector” refers to a compound and/or composition that transduces, transforms, or infects a host cell, thereby causing the cell to express polynucleotides and/or proteins other than those native to the cell, or in a manner not native to the cell. An “expression vector” contains a sequence of polynucleotides (ordinarily RNA or DNA) to be expressed by the host cell. Optionally, the expression vector also includes materials to aid in achieving entry of the polynucleotide into the host cell, such as a virus, liposome, protein coating, or the like. The expression vectors contemplated for use in the present disclosure include those into which a polynucleotide sequence can be inserted, along with any preferred or required operational elements. Further, the expression vector must be one that can be transferred into a host cell and replicated therein. Preferred expression vectors are plasmids, particularly those with restriction sites that have been well-documented and that contain the operational elements preferred or required for transcription of the polynucleotide sequence. Such plasmids, as well as other expression vectors, are well-known in the art.

[0112] Incorporation of the individual polynucleotides may be accomplished through known methods that include, for example, the use of restriction enzymes (such as BamHI, EcoRI, HhaI, XhoI, XmaI, and so forth) to cleave specific sites in the expression vector, e.g., plasmid. The restriction enzyme produces single stranded ends that may be annealed to a polynucleotide having, or synthesized to have, a terminus with a sequence complementary to the ends of the cleaved expression vector. Annealing is performed using an appropriate enzyme, e.g., DNA ligase. As will be appreciated by those of ordinary skill in the art, both the expression vector and the desired polynucleotide are often cleaved with the same restriction enzyme, thereby assuring that the ends of the expression vector and the ends of the polynucleotide are complementary to each other. In addition, DNA linkers may be used to facilitate linking of polynucleotide sequences into an expression vector.

[0113] A series of individual polynucleotides can also be combined by utilizing methods that are known in the art (e.g., U.S. Pat. No. 4,683,195). For example, each of the desired polynucleotides can be initially generated in a separate PCR. Thereafter, specific primers are designed such that the ends of the PCR products contain complementary sequences. When the PCR products are mixed, denatured, and reannealed, the strands having the matching sequences at their 3′ ends overlap and can act as primers for each other. Extension of this overlap by DNA polymerase produces a molecule in which the original sequences are “spliced” together. In this way, a series of individual polynucleotides may be “spliced” together and subsequently transduced into a host cell simultaneously. Thus, expression of each of the plurality of polynucleotides is affected.

[0114] Individual polynucleotides, or “spliced” polynucleotides, are then incorporated into an expression vector. The present disclosure is not limited with respect to the process by which the polynucleotide is incorporated into the expression vector. Those of ordinary skill in the art are familiar with the necessary steps for incorporating a polynucleotide into an expression vector. A typical expression vector contains the desired polynucleotide preceded by one or more regulatory regions, along with a ribosome binding site, e.g., a nucleotide sequence that is 3-9 nucleotides in length and located 3-11 nucleotides upstream of the initiation codon in E. coli. See Shine and Dalgarno (1975) Nature 254(5495):34-38 and Steitz (1979) Biological Regulation and Development (ed. Goldberger, R. F.), 1:349-399 (Plenum, N.Y.).

[0115] The term “operably linked” as used herein refers to a configuration in which a control sequence is placed at an appropriate position relative to the coding sequence of the DNA sequence or polynucleotide such that the control sequence directs the expression of a polypeptide.

[0116] Regulatory regions include, for example, those regions that contain a promoter and an operator. A promoter is operably linked to the desired polynucleotide, thereby initiating transcription of the polynucleotide via an RNA polymerase enzyme. An operator is a sequence of polynucleotides adjacent to the promoter, which contains a protein-binding domain where a repressor protein can bind. In the absence of a repressor protein, transcription initiates through the promoter. When present, the repressor protein specific to the protein-binding domain of the operator binds to the operator, thereby inhibiting transcription. In this way, control of transcription is accomplished, based upon the particular regulatory regions used and the presence or absence of the corresponding repressor protein. Examples include lactose promoters (Lad repressor protein changes conformation when contacted with lactose, thereby preventing the Lad repressor protein from binding to the operator) and tryptophan promoters (when complexed with tryptophan, TrpR repressor protein has a conformation that binds the operator; in the absence of tryptophan, the TrpR repressor protein has a conformation that does not bind to the operator). Another example is the tac promoter (see de Boer et al., (1983) Proc Natl Acad Sci USA 80(1):21-25).

[0117] Methods of producing host cells of the disclosure may include the introduction or transfer of the expression vectors containing recombinant nucleic acids of the disclosure into the host cell. Such methods for transferring expression vectors into host cells are well-known to those of ordinary skill in the art. For example, one method for transforming cells with an expression vector involves a calcium chloride treatment where the expression vector is introduced via a calcium precipitate. Other salts, e.g., calcium phosphate, may also be used following a similar procedure. In addition, electroporation (i.e., the application of current to increase the permeability of cells to nucleic acid sequences) may be used to transfect the host cell. Cells also may be transformed through the use of spheroplasts (Schweizer, M, Proc. Natl. Acad. Sci., 78: 5086-5090 (1981). Also, microinjection of the nucleic acid sequences provides the ability to transfect host cells. Other means, such as lipid complexes, liposomes, and dendrimers, may also be employed. Those of ordinary skill in the art can transfect a host cell with a desired sequence using these or other methods.

[0118] In some cases, cells are prepared as protoplasts or spheroplasts prior to transformation. Protoplasts or spheroplasts may be prepared, for example, by treating a cell having a cell wall with enzymes to degrade the cell wall. Fungal cells may be treated, for example, with chitinase.

[0119] The vector may be an autonomously replicating vector, i.e., a vector which exists as an extrachromosomal entity, the replication of which is independent of chromosomal replication, e.g., a plasmid, an extrachromosomal element, a minichromosome, or an artificial chromosome. The vector may contain any means for assuring self-replication. Alternatively, the vector may be one which, when introduced into the host, is integrated into the genome and replicated together with the chromosome(s) into which it has been integrated. Furthermore, a single vector or plasmid or two or more vectors or plasmids that together contain the total DNA to be introduced into the genome of the host, or a transposon may be used.

[0120] The vectors preferably contain one or more selectable markers which permit easy selection of transformed host cells. A selectable marker is a gene the product of which provides, for example, biocide or viral resistance, resistance to heavy metals, prototrophy to auxotrophs, and the like. Selection of bacterial cells may be based upon antimicrobial resistance that has been conferred by genes such as the amp, gpt, neo, and hyg genes.

[0121] Selectable markers for use in fungal host cells may include, for example, amdS (acetamidase), argB (ornithine carbamoyltransferase), bar (phosphinothricin acetyltransferase), hph (hygromycin phosphotransferase), niaD (nitrate reductase), pyrG (orotidine-5′-phosphate decarboxylase), sC (sulfate adenyltransferase), and trpC (anthranilate synthase), as well as equivalents thereof.

[0122] The vectors may contain an element(s) that permits integration of the vector into the host's genome or autonomous replication of the vector in the cell independent of the genome.

[0123] For integration into the host genome, the vector may rely on the gene's sequence or any other element of the vector for integration of the vector into the genome by homologous or nonhomologous recombination. Alternatively, the vector may contain additional nucleotide sequences for directing integration by homologous recombination into the genome of the host. The additional nucleotide sequences enable the vector to be integrated into the host genome at a precise location(s) in the chromosome(s). To increase the likelihood of integration at a precise location, the integrational elements should contain a sufficient number of nucleic acids, such as 100 to 10,000 base pairs, 400 to 10,000 base pairs, or 800 to 10,000 base pairs, which are highly homologous with the corresponding target sequence to enhance the probability of homologous recombination. The integrational elements may be any sequence that is homologous with the target sequence in the genome of the host. Furthermore, the integrational elements may be non-encoding or encoding nucleotide sequences. On the other hand, the vector may be integrated into the genome of the host by non-homologous recombination.

[0124] For autonomous replication, the vector may further contain an origin of replication enabling the vector to replicate autonomously in the host in question. The origin of replication may be any plasmid replicator mediating autonomous replication which functions in a cell. The term “origin of replication” or “plasmid replicator” is defined herein as a sequence that enables a plasmid or vector to replicate in vivo.

[0125] Various promoters for regulation of expression of a recombinant nucleic acid of the disclosure in a vector are well-known in the art and include, for example, constitutive promoters and inducible promoters. Promoters are described, for example, in Sambrook, et al. Molecular Cloning: A Laboratory Manual, 3rd edition, Cold Spring Harbor Laboratory Press, (2001). Promoter can be viral, bacterial, fungal, mammalian, or plant promoters. Additionally, promoters can be constitutive promoters, inducible promoters, environmentally regulated promoters, or developmentally regulated promoters. Examples of suitable promoters for regulating recombinant nucleic acid of the disclosure may include, for example, the N. crassa ccg-1 constitutive promoter, which is responsive to the N. crassa circadian rhythm and nutrient conditions; the N. crassa gpd-1 (glyceraldehyde 3-phosphate dehydrogenase-1) strong constitutive promoter; the N. crassa vvd (light) inducible promoter; the N. crassa qa-2 (quinic acid) inducible promoter; the Aspergillus nidulans gpdA promoter; the Aspergillus nidulans trpC constitutive promoter; the N. crassa tef-1 (transcription elongation factor) highly constitutive promoter; and the N. crassa xlr-1 (XlnR homolog) promoter, which is used frequently in Aspergillus species. In some embodiments, expression of a recombinant polypeptide of the disclosure is under the control of a heterologous promoter.

[0126] More than one copy of a gene may be inserted into the host to increase production of the gene product. An increase in the copy number of the gene can be obtained by integrating at least one additional copy of the gene into the host genome or by including an amplifiable selectable marker gene with the nucleotide sequence where cells containing amplified copies of the selectable marker gene, and thereby additional copies of the gene, can be selected for by cultivating the cells in the presence of the appropriate selectable agent.

[0127] The procedures used to ligate the elements described above to construct the recombinant expression vectors of the present disclosure are well-known to one skilled in the art (see, e.g., Sambrook et al., 1989, supra). When only a single expression vector is used (without the addition of an intermediate), the vector will contain all of the nucleic acid sequences necessary.

### Host Cells of the Disclosure

[0128] Host cells of the present disclosure may include various prokaryotic cells such as, for example, proteobacterial, archaebacterial, bacteroidal, enterobacterial, and spirochetal cells, as well as various eurkaryotic cells such as, for example, mammalian, insect, fungal and yeast cell types. Host cells of the present disclosure may be, for example, E. coli cells, Zymomonas mobilis (Z. mobilis) cells, Bacillus subtilis (B. subtilis) cells, yeast cells including S. cerevisiae cells and S. pombe cells, cyanobacterial cells such as Synechocystis sp. and Synechococcus sp., photosynthetic cells such as Rhodospirillum sp., solvent producing cells such as Clostridium sp. (such as, for example, Clostridium acetobutylicum and Clostridium beijerinckii), chemoautotrophic cells such as Ralstonia sp., in general and Ralstonia eutrophus for example, aromatic-degrading cells such as Pseudomonas sp. and Rhodococcus sp., thermophilic cells such as Thermoanaerobacterium saccharolyticum (T. saccharolyticum) and Thermotoga sp., cellulolytic cells such as Trichoderma reesei (T. reesei) cells, and Aspergillus niger (A. niger) cells, and lignocellulolytic cells such as Phanerochaete chrysosporium (P. chrysosporium).

[0129] Host cells of the present disclosure are living biological cells that may be manipulated to exhibit characteristics that differ from a corresponding control cell such as, for example, a naturally occurring wild-type cell. For example, host cells may be transformed via insertion of recombinant or heterologous DNA or RNA. Such recombinant DNA or RNA can be in an expression vector. Further, host cells may be subjected to mutagenesis to induce mutations in polypeptide-encoding polynucleotides. Host cells that have been genetically modified or engineered are recombinant host cells.

[0130] The host cells of the present disclosure may be genetically modified or engineered. For example, recombinant or heterologous nucleic acids may have been introduced into the host cells or the host cells may have mutations introduced into endogenous and/or exogenous polynucleotides, and as such the genetically modified or engineered host cells do not occur in nature. A suitable host cell may be, for example, one that is capable of expressing one or more nucleic acid constructs for different functions such as, for example, recombinant protein expression and/or targeted gene silencing.

[0131] “Recombinant nucleic acid” or “heterologous nucleic acid” or “recombinant polynucleotide”, “recombinant nucleotide” or “recombinant DNA” as used herein refers to a polymer of nucleic acids where at least one of the following is true: (a) the nucleic acid molecule is foreign to (i.e., not naturally found in) a given host cell; (b) the nucleic acid molecule may be naturally found in a given host cell, but its product is expressed in an unnatural (e.g., greater than expected) amount; or (c) the nucleic acid molecule contains two or more subsequences that are not found in the same relationship to each other in nature, wherein such alterations or modifications are introduced by genetic engineering. For example, regarding instance (c), a recombinant nucleic acid sequence will have two or more sequences from unrelated genes arranged to make a new functional nucleic acid. For example, the present disclosure describes the introduction of an expression vector into a host cell, where the expression vector contains a nucleic acid sequence coding for a protein that is not normally found in a host cell or contains a nucleic acid coding for a protein that is normally found in a cell but is under the control of different regulatory sequences. With reference to the host cell's genome, then, the nucleic acid sequence that codes for the protein is recombinant. As used herein, the term “recombinant polypeptide” refers to a polypeptide generated from a “recombinant nucleic acid” or “heterologous nucleic acid” or “recombinant polynucleotide”, “recombinant nucleotide” or “recombinant DNA” as described above.

[0132] In some embodiments, the host cell naturally produces one or more of the polypeptides of the present disclosure. In some embodiments, the genes encoding the desired polypeptides may be heterologous to the host cell or these genes may be endogenous to the host cell but are operatively linked to heterologous promoters and/or control regions that result in, for example, the higher expression of the gene(s) in the host cell or the decreased expression of the gene(s) in the host cell.

[0133] Host cells of the present disclosure may contain enzymes or other proteins having reduced activity as compared to a corresponding control cell, where those proteins may directly or indirectly negatively impact the production of alcohols by the host cell. For examples, proteins that may have reduced activity as compared to a corresponding control cell may be certain enzymes in pathways that utilize pyruvate or acetyl-CoA to synthesize products other than an alcohol.

[0134] One of skill in the art would readily recognize an appropriate corresponding control cell for use in a given comparison to a host cell of the present disclosure. For example, a corresponding control cell may be a wild-type cell. A corresponding control cell could include, for example, a parental cell, such that the parental cell is being compared to a child cell where some genetic modification has been made relative to the parental cell. A corresponding control cell could also include, for example, a cell similar to a host cell of the present disclosure that contains a bifunctional aldehyde/alcohol dehydrogenase, as opposed to a separate monofunctional aldehyde dehydrogenase and a monofunctional alcohol dehydrogenase.

[0135] In some embodiments, host cells of the present disclosure have reduced or eliminated activity of protein activities involved in the synthesis of lactate from pyruvate as compared to a corresponding control cell. In some embodiments, host cells of the present disclosure have reduced or eliminated activity of protein activities involved in the synthesis of acetate from acetyl-CoA as compared to a corresponding control cell. In some embodiments, host cells of the present disclosure have reduced or eliminated activity of protein activities involved in the synthesis of ethanol from acetyl-CoA as compared to a corresponding control cell.

[0136] In some embodiment, the host cell contains a lactate dehydrogenase that catalyzes the conversion of pyruvate to lactate with reduced or eliminated activity as compared to a corresponding control cell. The lactate dehydrogenase may be, for example, ldhA from E. coli. In some embodiments, the host cell contains a pyruvate oxidase that catalyzes the conversion of pyruvate to acetate with reduced or eliminated activity as compared to a corresponding control cell. The pyruvate oxidase may be, for example, poxB from E. coli. In some embodiments, the host cell contains an alcohol dehydrogenase that catalyzes the conversion of acetyl-CoA to ethanol with reduced or eliminated activity as compared to a corresponding control cell. The alcohol dehydrogenase may be, for example, adhE from E. coli. In some embodiments, the host cell contains an acetate kinase that catalyzes the conversion of acetyl-CoA to acetate with reduced or eliminated activity as compared to a corresponding control cell. The acetate kinase may be, for example, ackA. In some embodiments, the host cell contains a phosphotransacetylase that catalyzes the conversion of acetyl-CoA to acetate with reduced or eliminated activity as compared to a corresponding control cell. The phosphotransacetylase may be, for example, pta. In some embodiments, the host cell contains a fumarate dehydrogenase that catalyzes the conversion of succinate to fumarate with reduced or eliminated activity as compared to a corresponding control cell. The fumarate dehydrogenase may be, for example, frd from E. coli.

[0137] The activity of a protein or enzyme having reduced or eliminated activity may be reduced by at least about 5%, 10%, 20%, 30%, 40%, 50%, 60%, 70%, 80%, 90%, or 100% as compared to a corresponding control cell. Mutations reducing or eliminating the activity of proteins or enzymes may include, for example, point mutations that cause amino acid changes in the enzymes, deletion mutations, nonsense mutations, frameshift mutations, sequence duplications or inversions and insertions. Mutations may be introduced in a targeted or non-targeted manner. Reducing the activity of a protein or enzyme may also be introduced, either directly or indirectly, by molecular biology means such as, for example, the use of homologous recombinations, antisense technologies or RNA interference, or by chemical means, such as treatments with DNA intercalators or DNA methylating agents.

[0138] Methods of decreasing the expression, abundance, and/or activity of a polypeptide are well-known in the art and are described herein.

[0139] In some embodiments, decreasing activity of a polypeptide involves overexpressing a polypeptide that is an inhibitor of the polypeptide. Host cells may overexpress an inhibitor that inhibits the expression and/or activity of a polypeptide of the present disclosure. In some embodiments, a recombinant polypeptide may be expressed in host cells such that the recombinant polypeptide interferes with and decreases the activity of the endogenous polypeptide. In some embodiments, decreasing the activity of a polypeptide involves decreasing the expression of a nucleic acid encoding the polypeptide.

[0140] Mutagenesis approaches may be used to disrupt or “knockout” the expression of a target gene by generating mutations. In some embodiments, the mutagenesis results in a partial deletion of the target gene. In other embodiments, the mutagenesis results in a complete deletion of the target gene. Methods of mutagenizing microorganisms are well known in the art and include, for example, random mutagenesis and site-directed mutagenesis to induce mutations. Examples of methods of random mutagenesis include, for example, chemical mutagenesis (e.g., using ethane methyl sulfonate), insertional mutagenesis, and irradiation.

[0141] One method for reducing or inhibiting the expression of a target gene is by genetically modifying or engineering the target gene and introducing it into the genome of a host cell to replace the wild-type version of the gene by homologous recombination (for example, as described in U.S. Pat. No. 6,924,146).

[0142] Another method for reducing or inhibiting the expression of a target gene is by insertion mutagenesis using the T-DNA of Agrobacterium tumefaciens, or transposons (see Winkler et al., Methods Mol. Biol. 82:129-136, 1989, and Martienssen Proc. Natl. Acad. Sci. 95:2021-2026, 1998). After generating the insertion mutants, the mutants can be screened to identify those containing the insertion in a target gene. Methods to disrupt a target gene by insertional mutagenesis are described in for example, U.S. Pat. No. 5,792,633. Methods to disrupt a target gene by transposon mutagenesis are described in for example, U.S. Pat. No. 6,207,384.

[0143] A further method to disrupt a target gene is by use of the cre-lox system (for example, as described in U.S. Pat. No. 4,959,317). Another method to disrupt a target gene is by use of PCR mutagenesis (for example, as described in U.S. Pat. No. 7,501,275). Endogenous gene expression may also be reduced or inhibited by means of RNA interference (RNAi), which uses a double-stranded RNA having a sequence identical or similar to the sequence of the target gene. RNAi may include the use of micro RNA, such as artificial miRNA, to suppress expression of a gene.

[0144] RNAi is the phenomenon in which when a double-stranded RNA having a sequence identical or similar to that of the target gene is introduced into a cell, the expressions of both the inserted exogenous gene and target endogenous gene are suppressed. The double-stranded RNA may be formed from two separate complementary RNAs or may be a single RNA with internally complementary sequences that form a double-stranded RNA.

[0145] Thus, in some embodiments, reduction or inhibition of gene expression is achieved using RNAi techniques. For example, to achieve reduction or inhibition of the expression of a DNA encoding a protein using RNAi, a double-stranded RNA having the sequence of a DNA encoding the protein, or a substantially similar sequence thereof (including those engineered not to translate the protein) or fragment thereof, is introduced into a host cell of interest. As used herein, RNAi and dsRNA both refer to gene-specific silencing that is induced by the introduction of a double-stranded RNA molecule, see e.g., U.S. Pat. Nos. 6,506,559 and 6,573,099, and includes reference to a molecule that has a region that is double-stranded, e.g., a short hairpin RNA molecule. The resulting cells may then be screened for a phenotype associated with the reduced expression of the target gene, e.g., reduced cellulase expression, and/or by monitoring steady-state RNA levels for transcripts of the target gene. Although the sequences used for RNAi need not be completely identical to the target gene, they may be at least 70%, 80%, 90%, 91%, 92%, 93%, 94%, 95%, 96%, 97%, 98%, 99%, or more identical to the target gene sequence. See, e.g., U.S. Patent Application Publication No. 2004/0029283. The constructs encoding an RNA molecule with a stem-loop structure that is unrelated to the target gene and that is positioned distally to a sequence specific for the gene of interest may also be used to inhibit target gene expression. See, e.g., U.S. Patent Application Publication No. 2003/0221211.

[0146] The RNAi nucleic acids may encompass the full-length target RNA or may correspond to a fragment of the target RNA. In some cases, the fragment will have fewer than 100, 200, 300, 400, or 500 nucleotides corresponding to the target sequence. In addition, in some aspects, these fragments are at least, e.g., 50, 100, 150, 200, or more nucleotides in length. Interfering RNAs may be designed based on short duplexes (i.e., short regions of double-stranded sequences). Typically, the short duplex is at least about 15, 20, or 25-50 nucleotides in length (e.g., each complementary sequence of the double stranded RNA is 15-50 nucleotides in length), often about 20-30 nucleotides, e.g., 20, 21, 22, 23, 24, 25, 26, 27, 28, 29, or 30 nucleotides in length. In some cases, fragments for use in RNAi will correspond to regions of a target protein that do not occur in other proteins in the organism or that have little similarity to other transcripts in the organism, e.g., selected by comparison to sequences in analyzing publicly-available sequence databases. Similarly, RNAi fragments may be selected for similarity or identity with a conserved sequence of a gene family of interest, such as those described herein, so that the RNAi targets multiple different gene transcripts containing the conserved sequence.

[0147] RNAi may be introduced into a host cell as part of a larger DNA construct. Often, such constructs allow stable expression of the RNAi in cells after introduction, e.g., by integration of the construct into the host genome. Thus, expression vectors that continually express RNAi in cells transfected with the vectors may be employed for this disclosure. For example, vectors that express small hairpin or stem-loop structure RNAs, or precursors to microRNA, which get processed in vivo into small RNAi molecules capable of carrying out gene-specific silencing (Brummelkamp et al, Science 296:550-553, (2002); and Paddison, et al., Genes & Dev. 16:948-958, (2002)) can be used. Post-transcriptional gene silencing by double-stranded RNA is discussed in further detail by Hammond et al., Nature Rev Gen 2: 110-119, (2001); Fire et al., Nature 391: 806-811, (1998); and Timmons and Fire, Nature 395: 854, (1998). Methods for selection and design of sequences that generate RNAi are well-known in the art (e.g. U.S. Pat. Nos. 6,506,559; 6,511,824; and 6,489,127).

[0148] A reduction or inhibition of gene expression in a host cell of a target gene may also be obtained by introducing into host cells antisense constructs based on a target gene nucleic acid sequence. For antisense suppression, a target sequence is arranged in reverse orientation relative to the promoter sequence in the expression vector. The introduced sequence need not be a full length cDNA or gene, and need not be identical to the target cDNA or a gene found in the cell to be transformed. Generally, however, where the introduced sequence is of shorter length, a higher degree of homology to the native target sequence is used to achieve effective antisense suppression. In some aspects, the introduced antisense sequence in the vector will be at least 30 nucleotides in length, and improved antisense suppression will typically be observed as the length of the antisense sequence increases. In some aspects, the length of the antisense sequence in the vector will be greater than 100 nucleotides. Transcription of an antisense construct as described results in the production of RNA molecules that are the reverse complement of mRNA molecules transcribed from an endogenous target gene. Suppression of a target gene expression can also be achieved using a ribozyme. The production and use of ribozymes are disclosed in U.S. Pat. Nos. 4,987,071 and 5,543,508.

[0149] Expression cassettes containing nucleic acids that encode target gene expression inhibitors, e.g., an antisense or siRNA, can be constructed using methods well known in the art. Constructs include regulatory elements, including promoters and other sequences for expression and selection of cells that express the construct. Typically, fungal and/or bacterial transformation vectors include one or more cloned coding sequences (genomic or cDNA) under the transcriptional control of 5′ and 3′ regulatory sequences and a dominant selectable marker. Such transformation vectors typically also contain a promoter (e.g., a regulatory region controlling inducible or constitutive, environmentally- or developmentally-regulated expression), a transcription initiation start site, an RNA processing signal (such as intron splice sites), a transcription termination site, and/or a polyadenylation signal.

[0150] Host cells of the present disclosure may contain one or more polypeptides with increased activity as compared to a corresponding control cell. Various methods of increasing polypeptide activity are well-known in the art and are described herein. In certain embodiments, a recombinant nucleic acid is mis-expressed in the host cell (e.g., constitutively expressed, inducibly expressed, etc.) such that mis-expression results in increased polypeptide activity as compared to a corresponding control cell. In some embodiments, a host cell that contains a recombinant nucleic acid encoding a recombinant polypeptide contains a greater amount of the polypeptide than a corresponding control cell that does not contain the corresponding recombinant nucleic acid. When a protein or nucleic acid is produced or maintained in a host cell at an amount greater than normal, the protein or nucleic acid is “overexpressed.” The corresponding control cell may be, for example, a cell that does not overexpress one or more of the polypeptides overexpressed in the host cell. Various control cells will be readily apparent to one of skill in the art, as described above.

[0151] Various methods of increasing the expression of a polypeptide are known in the art. For example, other genetic regions involved in controlling expression of the nucleic acid encoding the polypeptide, such as an enhancer sequence, may be modified such that expression of the nucleic acid is increased. The level of expression of a nucleic acid may be assessed by measuring the level of mRNA encoded by the gene, and/or by measuring the level or activity of the polypeptide encoded by the nucleic acid.

[0152] In some embodiments, host cells overexpress a polypeptide that is an activator of one or more of polypeptides of the present disclosure. Overexpression of an activator polypeptide may lead to increased abundance and activity of the polypeptide activated by the activator.

[0153] Increasing the abundance of a polypeptide of the disclosure to increase polypeptide activity may be achieved by overexpressing the polypeptide. Other methods of increasing abundance of a polypeptide are known in the art. For example, decreasing degradation of the polypeptide by cellular degradation machinery, such as the proteasome, may increase the stability and the abundance of the polypeptide. The polypeptides may be genetically modified or engineered such that they have increased resistance to cellular proteolysis, but exhibit no change in molecular activity. Polypeptides that are inhibitors of cellular factors involved in the degradation of one or more of polypeptides of the present disclosure may be introduced into host cells to increase abundance of the one or more polypeptides. Further, host cells may be treated with chemical inhibitors of the proteasome, such as cycloheximide, to increase the abundance of one or more polypeptides of the disclosure.

### Methods for Producing an Alcohol

[0154] The present disclosure relates to methods for the production of an alcohol by a host cell of the present disclosure. In certain aspects, the methods and host cells of the present disclosure relate to the production of an alcohol from an acyl-CoA. In some embodiments, the alcohol produced is a C4 alcohol.

[0155] Certain aspects of the present disclosure involve culturing a host cell of the present disclosure in a culture medium containing a suitable carbon source such that the host cell produces an alcohol. The alcohol may be a C4 alcohol such as, for example, n-butanol, crotyl alcohol, 1,3-butanediol, and/or 4-hydroxy-2-butanone. In some embodiments, a host cell of the present disclosure may contain a biosynthetic pathway for the production of n-butanol, crotyl alcohol, 1,3-butanediol, and/or 4-hydroxy-2-butanone. In some embodiments, a host cell of the present disclosure may contain a biosynthetic pathway for the production of one or more of n-butanol, crotyl alcohol, 1,3-butanediol, and 4-hydroxy-2-butanone.

[0156] Growth Conditions for Host Cells

[0157] Host cells of the present disclosure are capable of utilizing a suitable carbon source in a growth/culture medium to aid in the production of an alcohol by the host cell. “Carbon source” generally refers to a substrate or compound suitable for use as a source of carbon for cell growth. Suitable carbon sources may include, for example, glucose, glycerol, sugars, starches, and lignocellulosics, including glucose derived from cellulose and C5 sugars derived from hemicellulose, such as xylose. Additional suitable carbon sources may include, for example, various compounds such as polymers, carbohydrates, acids, alcohols, aldehydes, ketones, amino acids, peptides, etc. These include, for example, various monosaccharides, oligosaccharides, polysaccharides, a biomass polymer such as cellulose or hemicellulose, arabinose, disaccharides, such as sucrose, saturated or unsaturated fatty acids, succinate, lactate, acetate, ethanol, etc., or mixtures thereof.

[0158] In addition to an appropriate carbon source, culture media may contain suitable minerals, salts, cofactors, buffers and other components, known to those skilled in the art, suitable for the growth of the cultures and promotion of the pathways involved in the production of an alcohol. Reactions may be performed under aerobic or anaerobic conditions where aerobic, anoxic, microaerobic, or anaerobic conditions are preferred based on the requirements of the host cell.

[0159] In some embodiments, suitable carbon sources of the present disclosure may include materials derived from plant biomass. In embodiments where host cells of the present disclosure a cultured in the presence of materials derived from plant biomass, plant material may be subjected to pretreatment including ammonia fiber expansion (AFEX), steam explosion, treatment with alkaline aqueous solutions, acidic solutions, organic solvents, ionic liquids (IL), electrolyzed water, phosphoric acid, and combinations thereof. Pretreatments that remove lignin from the plant material may increase the overall amount of sugar released from the hemicellulose. Because hemicellulose degradation yields both C6 sugars (e.g., glucose) and C5 sugars (e.g., xylose) a combination of biosynthesis pathways for the production of an alcohol of the present disclosure with improved recombinant glycolysis pathways (for C6 sugar assimilation) or improved recombinant pentose phosphate pathways (for C5 sugar assimilation) may be useful for the achievement of optimal or maximal biomass utilization and yields of the alcohol.

[0160] Plant biomass suitable for use with the currently disclosed methods include various cellulose-containing materials such as, for example, Miscanthus, switchgrass, cord grass, rye grass, reed canary grass, elephant grass, common reed, wheat straw, barley straw, canola straw, oat straw, corn stover, soybean stover, oat hulls, sorghum, rice hulls, rye hulls, wheat hulls, sugarcane bagasse, copra meal, copra pellets, palm kernel meal, corn fiber, Distillers Dried Grains with Solubles (DDGS), Blue Stem, corncobs, pine wood, birch wood, willow wood, aspen wood, poplar wood, energy cane, waste paper, sawdust, forestry wastes, municipal solid waste, waste paper, crop residues, other grasses, and other woods. As described above, the plant material may require a pre-treatment to generate and/or liberate useful carbon sources such as sugars or polysaccharides. Pretreatment may involve, for example, treatment with high temperature or pressure. Such treatments are well-known to those skilled in the art.

[0161] Cofactor Specificity

[0162] Biomass degradation, and especially the degradation of hemicellulose, yields both C6 sugars such as glucose and C5 sugars such as xylose. Whereas C6 sugars are typically metabolized through the NAD⁺/NADH-dependent Embden-Meyerhof-Parnas pathway (the most common glycolytic pathway), C5 sugars are typically metabolized through the Pentose Phosphate Pathway, which is NADP⁺/NADPH-dependent. NADP⁺/NADPH-dependent enzymes of the Pentose Phosphate Pathway include a glucose dehydrogenase, such as gcd of E. coli, and a 2-keto-D-gluconate reductase, such as tiaE of E. coli. Applicants do not wish to be bound by theory. However, when host cells are used to produce an alcohol when cultured in the presence of hemicellulose-derived carbon sources, it may be beneficial to integrate NADPH-specific enzymes, such as the 3-hydroxybutyryl-CoA dehydrogenase PhaB from R. eutrophus, in the particular alcohol biosynthesis pathway to rebalance the NADP⁺ required for continued C5 sugar assimilation.

[0163] Further, because the metabolism of different carbon sources may differentially impact cellular NAD⁺/NADH- and NADP⁺/NADPH-redox systems, without wishing to be bound by theory, it is further believed that it may be beneficial to tailor certain biosynthesis pathways for the production of an alcohol to contain the most effective number of either NAD⁺/NADH-dependent or NADP⁺/NADPH-dependent enzymes. This tailoring may allow for an advantageous rebalancing of the respective redox systems and ultimately leads to more favorable or maximal carbon source utilization and yields of the alcohol. For example, when metabolizing a hexose-rich carbon source, recombinant host cells containing a greater number of NAD⁺/NADH-dependent enzymes may be used. On the contrary, when metabolizing a pentose-rich carbon source, recombinant host cells containing a greater number of NADP⁺/NADPH-dependent enzymes may be used. When metabolizing a carbon source yielding a mix of hexoses and pentoses, such as hemicellulose, recombinant host cells containing a mixture of NAD⁺/NADH-dependent and NADP⁺/NADPH-dependent enzymes may be used, such as within the recombinant n-butanol pathway.

[0164] Production of an Alcohol

[0165] The present disclosure provides methods for producing an alcohol using host cells of the present disclosure. In certain aspects, the methods and host cells of the present disclosure relate to the production of an alcohol from an acyl-CoA. In some embodiments, the alcohol produced is a C4 alcohol.

[0166] The methods and host cells of the present disclosure may be used to convert an acyl-CoA into alcohols such as, for example, a C4 alcohol. When cultured in the presence of a suitable carbon source, host cells of the present disclosure may produce, for example, one or more of n-butanol, crotyl alcohol, 1,3-butanediol, and/or 4-hydroxy-2-butanone.

[0167] In some embodiments, the production of an alcohol by a host cell such as, for example, an alcohol produced from an acyl-CoA, may be, for example, at least 0.1-fold, at least 0.2-fold, at least 0.3-fold, at least 0.4-fold, at least 0.5-fold, at least 0.6-fold, at least 0.7-fold, at least 0.8-fold, at least 0.9-fold, at least 1-fold, at least 1.25-fold, at least 1.5-fold, at least 1.75-fold, at least 2-fold, at least 2.25-fold, at least 2.5-fold, at least 2.75-fold, at least 3-fold, at least 3.25-fold, at least 3.5-fold, at least 3.75-fold, at least 4-fold, at least 4.25-fold, at least 4.5-fold, at least 4.75-fold, at least 5-fold, at least 5.25-fold, at least 5.5-fold, at least 5.75-fold, at least 6-fold, at least 8-fold, at least 10-fold, at least 12-fold, at least 15-fold, at least 20-fold, at least 25-fold, at least 30-fold, at least 40-fold, at least 50-fold, at least 60-fold, at least 70-fold, at least 80-fold, at least 100-fold, at least 150-fold, at least 200-fold, at least 250-fold, at least 300-fold or more higher than the production of an alcohol by a corresponding control cell. In some embodiments, the alcohol produced is a C4 alcohol. Total levels of the alcohol produced by a host cell may be, for example, at least 5%, at least 10%, at least 15%, at least 20%, at least 25%, at least 30%, at least 35%, at least 40%, at least 45%, at least 50%, at least 55%, at least 60%, at least 65%, at least 70%, at least 75%, at least 80%, at least 85%, at least 90%, at least 95%, or at least 100% higher than the total levels of the alcohol produced by a corresponding control cell. In some embodiments, the alcohol produced is a C4 alcohol.

[0168] In some embodiments, the production of n-butanol by a host cell may be, for example, at least 0.1-fold, at least 0.2-fold, at least 0.3-fold, at least 0.4-fold, at least 0.5-fold, at least 0.6-fold, at least 0.7-fold, at least 0.8-fold, at least 0.9-fold, at least 1-fold, at least 1.25-fold, at least 1.5-fold, at least 1.75-fold, at least 2-fold, at least 2.25-fold, at least 2.5-fold, at least 2.75-fold, at least 3-fold, at least 3.25-fold, at least 3.5-fold, at least 3.75-fold, at least 4-fold, at least 4.25-fold, at least 4.5-fold, at least 4.75-fold, at least 5-fold, at least 5.25-fold, at least 5.5-fold, at least 5.75-fold, at least 6-fold, at least 8-fold, at least 10-fold, at least 12-fold, at least 15-fold, at least 20-fold, at least 25-fold, at least 30-fold, at least 40-fold, at least 50-fold, at least 60-fold, at least 70-fold, at least 80-fold, at least 100-fold, at least 150-fold, at least 200-fold, at least 250-fold, at least 300-fold or more higher than the production of n-butanol by a corresponding control cell. Total levels of n-butanol produced by a host cell may be, for example, at least 5%, at least 10%, at least 15%, at least 20%, at least 25%, at least 30%, at least 35%, at least 40%, at least 45%, at least 50%, at least 55%, at least 60%, at least 65%, at least 70%, at least 75%, at least 80%, at least 85%, at least 90%, at least 95%, or at least 100% higher than the total levels of n-butanol produced by a corresponding control cell.

[0169] In some embodiments, the production of crotyl alcohol by a host cell may be, for example, at least 0.1-fold, at least 0.2-fold, at least 0.3-fold, at least 0.4-fold, at least 0.5-fold, at least 0.6-fold, at least 0.7-fold, at least 0.8-fold, at least 0.9-fold, at least 1-fold, at least 1.25-fold, at least 1.5-fold, at least 1.75-fold, at least 2-fold, at least 2.25-fold, at least 2.5-fold, at least 2.75-fold, at least 3-fold, at least 3.25-fold, at least 3.5-fold, at least 3.75-fold, at least 4-fold, at least 4.25-fold, at least 4.5-fold, at least 4.75-fold, at least 5-fold, at least 5.25-fold, at least 5.5-fold, at least 5.75-fold, at least 6-fold, at least 8-fold, at least 10-fold, at least 12-fold, at least 15-fold, at least 20-fold, at least 25-fold, at least 30-fold, at least 40-fold, at least 50-fold, at least 60-fold, at least 70-fold, at least 80-fold, at least 100-fold, at least 150-fold, at least 200-fold, at least 250-fold, at least 300-fold or more higher than the production of crotyl alcohol by a corresponding control cell. Total levels of crotyl alcohol produced by a host cell may be, for example, at least 5%, at least 10%, at least 15%, at least 20%, at least 25%, at least 30%, at least 35%, at least 40%, at least 45%, at least 50%, at least 55%, at least 60%, at least 65%, at least 70%, at least 75%, at least 80%, at least 85%, at least 90%, at least 95%, or at least 100% higher than the total levels of crotyl alcohol produced by a corresponding control cell.

[0170] In some embodiments, the production of 1,3-butanediol by a host cell may be, for example, at least 0.1-fold, at least 0.2-fold, at least 0.3-fold, at least 0.4-fold, at least 0.5-fold, at least 0.6-fold, at least 0.7-fold, at least 0.8-fold, at least 0.9-fold, at least 1-fold, at least 1.25-fold, at least 1.5-fold, at least 1.75-fold, at least 2-fold, at least 2.25-fold, at least 2.5-fold, at least 2.75-fold, at least 3-fold, at least 3.25-fold, at least 3.5-fold, at least 3.75-fold, at least 4-fold, at least 4.25-fold, at least 4.5-fold, at least 4.75-fold, at least 5-fold, at least 5.25-fold, at least 5.5-fold, at least 5.75-fold, at least 6-fold, at least 8-fold, at least 10-fold, at least 12-fold, at least 15-fold, at least 20-fold, at least 25-fold, at least 30-fold, at least 40-fold, at least 50-fold, at least 60-fold, at least 70-fold, at least 80-fold, at least 100-fold, at least 150-fold, at least 200-fold, at least 250-fold, at least 300-fold or more higher than the production of 1,3-butanediol by a corresponding control cell. Total levels of 1,3-butanediol produced by a host cell may be, for example, at least 5%, at least 10%, at least 15%, at least 20%, at least 25%, at least 30%, at least 35%, at least 40%, at least 45%, at least 50%, at least 55%, at least 60%, at least 65%, at least 70%, at least 75%, at least 80%, at least 85%, at least 90%, at least 95%, or at least 100% higher than the total levels of 1,3-butanediol produced by a corresponding control cell.

[0171] In some embodiments, the production of 4-hydroxy-2-butanone by a host cell may be, for example, at least 0.1-fold, at least 0.2-fold, at least 0.3-fold, at least 0.4-fold, at least 0.5-fold, at least 0.6-fold, at least 0.7-fold, at least 0.8-fold, at least 0.9-fold, at least 1-fold, at least 1.25-fold, at least 1.5-fold, at least 1.75-fold, at least 2-fold, at least 2.25-fold, at least 2.5-fold, at least 2.75-fold, at least 3-fold, at least 3.25-fold, at least 3.5-fold, at least 3.75-fold, at least 4-fold, at least 4.25-fold, at least 4.5-fold, at least 4.75-fold, at least 5-fold, at least 5.25-fold, at least 5.5-fold, at least 5.75-fold, at least 6-fold, at least 8-fold, at least 10-fold, at least 12-fold, at least 15-fold, at least 20-fold, at least 25-fold, at least 30-fold, at least 40-fold, at least 50-fold, at least 60-fold, at least 70-fold, at least 80-fold, at least 100-fold, at least 150-fold, at least 200-fold, at least 250-fold, at least 300-fold or more higher than the production of 4-hydroxy-2-butanone by a corresponding control cell. Total levels of 4-hydroxy-2-butanone produced by a host cell may be, for example, at least 5%, at least 10%, at least 15%, at least 20%, at least 25%, at least 30%, at least 35%, at least 40%, at least 45%, at least 50%, at least 55%, at least 60%, at least 65%, at least 70%, at least 75%, at least 80%, at least 85%, at least 90%, at least 95%, or at least 100% higher than the total levels of 4-hydroxy-2-butanone produced by a corresponding control cell.

[0172] Further, the use of separate monofunctional aldehyde dehydrogenases and monofunctional alcohol dehydrogenases in host cells may allow for significant decreases in the production of ethanol in the host cell.

[0173] In some embodiments, a host cell of the present disclosure produces a non-ethanol alcohol such as, for example, a non-ethanol alcohol produced from an acyl-CoA, at concentrations that are, for example, at least 0.1-fold, at least 0.2-fold, at least 0.3-fold, at least 0.4-fold, at least 0.5-fold, at least 0.6-fold, at least 0.7-fold, at least 0.8-fold, at least 0.9-fold, at least 1-fold, at least 1.25-fold, at least 1.5-fold, at least 1.75-fold, at least 2-fold, at least 2.25-fold, at least 2.5-fold, at least 2.75-fold, at least 3-fold, at least 3.25-fold, at least 3.5-fold, at least 3.75-fold, at least 4-fold, at least 4.25-fold, at least 4.5-fold, at least 4.75-fold, at least 5-fold, at least 5.25-fold, at least 5.5-fold, at least 5.75-fold, at least 6-fold, at least 8-fold, at least 10-fold, at least 12-fold, at least 15-fold, at least 20-fold, at least 25-fold, at least 30-fold, at least 40-fold, at least 50-fold, at least 60-fold, at least 70-fold, at least 80-fold, at least 100-fold, at least 150-fold, at least 200-fold, at least 250-fold, at least 300-fold or more higher than the concentration of ethanol produced by the host cell. Ethanol production by a host cell that produces a non-ethanol alcohol such as, for example, a non-ethanol alcohol produced from an acyl-CoA, according to the methods of the present disclosure may be decreased by, for example, at least 5%, at least 10%, at least 15%, at least 20%, at least 25%, at least 30%, at least 35%, at least 40%, at least 45%, at least 50%, at least 55%, at least 60%, at least 65%, at least 70%, at least 75%, at least 80%, at least 85%, at least 90%, or at least 95% or more as compared to a corresponding control cell. In some embodiments, the non-ethanol alcohol produced is a C4 alcohol.

[0174] In some embodiments, a host cell of the present disclosure produces n-butanol at concentrations that are, for example, at least 0.1-fold, at least 0.2-fold, at least 0.3-fold, at least 0.4-fold, at least 0.5-fold, at least 0.6-fold, at least 0.7-fold, at least 0.8-fold, at least 0.9-fold, at least 1-fold, at least 1.25-fold, at least 1.5-fold, at least 1.75-fold, at least 2-fold, at least 2.25-fold, at least 2.5-fold, at least 2.75-fold, at least 3-fold, at least 3.25-fold, at least 3.5-fold, at least 3.75-fold, at least 4-fold, at least 4.25-fold, at least 4.5-fold, at least 4.75-fold, at least 5-fold, at least 5.25-fold, at least 5.5-fold, at least 5.75-fold, at least 6-fold, at least 8-fold, at least 10-fold, at least 12-fold, at least 15-fold, at least 20-fold, at least 25-fold, at least 30-fold, at least 40-fold, at least 50-fold, at least 60-fold, at least 70-fold, at least 80-fold, at least 100-fold, at least 150-fold, at least 200-fold, at least 250-fold, at least 300-fold or more higher than the concentration of ethanol produced by the host cell. Ethanol production by a host cell that produces n-butanol according to the methods of the present disclosure may be decreased by, for example, at least 5%, at least 10%, at least 15%, at least 20%, at least 25%, at least 30%, at least 35%, at least 40%, at least 45%, at least 50%, at least 55%, at least 60%, at least 65%, at least 70%, at least 75%, at least 80%, at least 85%, at least 90%, or at least 95% or more as compared to a corresponding control cell.

[0175] In some embodiments, a host cell of the present disclosure produces crotyl alcohol at concentrations that are, for example, at least 0.1-fold, at least 0.2-fold, at least 0.3-fold, at least 0.4-fold, at least 0.5-fold, at least 0.6-fold, at least 0.7-fold, at least 0.8-fold, at least 0.9-fold, at least 1-fold, at least 1.25-fold, at least 1.5-fold, at least 1.75-fold, at least 2-fold, at least 2.25-fold, at least 2.5-fold, at least 2.75-fold, at least 3-fold, at least 3.25-fold, at least 3.5-fold, at least 3.75-fold, at least 4-fold, at least 4.25-fold, at least 4.5-fold, at least 4.75-fold, at least 5-fold, at least 5.25-fold, at least 5.5-fold, at least 5.75-fold, at least 6-fold, at least 8-fold, at least 10-fold, at least 12-fold, at least 15-fold, at least 20-fold, at least 25-fold, at least 30-fold, at least 40-fold, at least 50-fold, at least 60-fold, at least 70-fold, at least 80-fold, at least 100-fold, at least 150-fold, at least 200-fold, at least 250-fold, at least 300-fold or more higher than the concentration of ethanol produced by the host cell. Ethanol production by a host cell that produces crotyl alcohol according to the methods of the present disclosure may be decreased by, for example, at least 5%, at least 10%, at least 15%, at least 20%, at least 25%, at least 30%, at least 35%, at least 40%, at least 45%, at least 50%, at least 55%, at least 60%, at least 65%, at least 70%, at least 75%, at least 80%, at least 85%, at least 90%, or at least 95% or more as compared to a corresponding control cell.

[0176] In some embodiments, a host cell of the present disclosure produces 1,3-butanediol at concentrations that are, for example, at least 0.1-fold, at least 0.2-fold, at least 0.3-fold, at least 0.4-fold, at least 0.5-fold, at least 0.6-fold, at least 0.7-fold, at least 0.8-fold, at least 0.9-fold, at least 1-fold, at least 1.25-fold, at least 1.5-fold, at least 1.75-fold, at least 2-fold, at least 2.25-fold, at least 2.5-fold, at least 2.75-fold, at least 3-fold, at least 3.25-fold, at least 3.5-fold, at least 3.75-fold, at least 4-fold, at least 4.25-fold, at least 4.5-fold, at least 4.75-fold, at least 5-fold, at least 5.25-fold, at least 5.5-fold, at least 5.75-fold, at least 6-fold, at least 8-fold, at least 10-fold, at least 12-fold, at least 15-fold, at least 20-fold, at least 25-fold, at least 30-fold, at least 40-fold, at least 50-fold, at least 60-fold, at least 70-fold, at least 80-fold, at least 100-fold, at least 150-fold, at least 200-fold, at least 250-fold, at least 300-fold or more higher than the concentration of ethanol produced by the host cell. Ethanol production by a host cell that produces 1,3-butanediol according to the methods of the present disclosure may be decreased by, for example, at least 5%, at least 10%, at least 15%, at least 20%, at least 25%, at least 30%, at least 35%, at least 40%, at least 45%, at least 50%, at least 55%, at least 60%, at least 65%, at least 70%, at least 75%, at least 80%, at least 85%, at least 90%, or at least 95% or more as compared to a corresponding control cell.

[0177] In some embodiments, a host cell of the present disclosure produces 4-hydroxy-2-butanone at concentrations that are, for example, at least 0.1-fold, at least 0.2-fold, at least 0.3-fold, at least 0.4-fold, at least 0.5-fold, at least 0.6-fold, at least 0.7-fold, at least 0.8-fold, at least 0.9-fold, at least 1-fold, at least 1.25-fold, at least 1.5-fold, at least 1.75-fold, at least 2-fold, at least 2.25-fold, at least 2.5-fold, at least 2.75-fold, at least 3-fold, at least 3.25-fold, at least 3.5-fold, at least 3.75-fold, at least 4-fold, at least 4.25-fold, at least 4.5-fold, at least 4.75-fold, at least 5-fold, at least 5.25-fold, at least 5.5-fold, at least 5.75-fold, at least 6-fold, at least 8-fold, at least 10-fold, at least 12-fold, at least 15-fold, at least 20-fold, at least 25-fold, at least 30-fold, at least 40-fold, at least 50-fold, at least 60-fold, at least 70-fold, at least 80-fold, at least 100-fold, at least 150-fold, at least 200-fold, at least 250-fold, at least 300-fold or more higher than the concentration of ethanol produced by the host cell. Ethanol production by a host cell that produces 4-hydroxy-2-butanone according to the methods of the present disclosure may be decreased by, for example, at least 5%, at least 10%, at least 15%, at least 20%, at least 25%, at least 30%, at least 35%, at least 40%, at least 45%, at least 50%, at least 55%, at least 60%, at least 65%, at least 70%, at least 75%, at least 80%, at least 85%, at least 90%, or at least 95% or more as compared to a corresponding control cell.

[0178] In some embodiments where a monofunctional secondary alcohol dehydrogenase is used to modulate the production of both 4-hydroxy-2-butanone and 1,3-butanediol in a host cell, the ratio in the production titers between these two compounds may vary. For example, the ratio of production titers of 4-hydroxy-2-butanone to 1,3-butanediol may be about 1:200, about 1:150, about 1:100, about 1:75, about 1:50, about 1:25, about 1:10, about 1:5, or about 1:2.

[0179] Metabolites and products such as, for example, C4 alcohols produced by host cells according to the methods of the present disclosure may be identified and quantified using standard methods known to those of skill in the art. For example, standard methods may include standard HPLC chromatography and mass spectrometry techniques. Enzymatic activities present in or by host cells may also be analyzed and/or quantified using traditional spectrophotometric activity assays relying on the detection of NAD(P)H cofactor consumption.

[0180] Various techniques known to those of skill in the art may also be used to substantially purify an alcohol such as, for example, an alcohol produced by a host cell away from the culture medium, thus producing a substantially purified alcohol.

[0181] A substantially purified alcohol generally refers to an alcohol that is substantially free of contaminating agents (e.g. cellular material and other culture medium components) from the culture medium source where the alcohol is produced by the host cell. For example, a substantially purified alcohol may be in association with less than 30%, 20%, 10%, and more preferably 5% or less (by weight) contaminating agents. A composition containing a substantially purified alcohol preparation may include, for example, a composition where culture medium (and associated contaminating agents) represents less than about 20%, sometimes less than about 10%, and often less than about 5% of the volume of the alcohol preparation.

### EXAMPLES

[0182] The following Examples are offered for illustrative purposes and to aid one of skill in better understanding the various embodiments of the disclosure. The following Examples are not intended to limit the scope of the present disclosure in any way.

### Example 1: Monofunctional Aldehyde Dehydrogenases and Monofunctional Alcohol Dehydrogenases for Production of Fuels and Commodity Chemicals

[0183] The Example demonstrates that a monofunctional aldehyde dehydrogenase and a monofunctional alcohol dehydrogenase can be used in multiple biosynthetic pathways for the production of multiple alcohols in E. coli.

### Introduction

[0184] As described above, the major biofuel in use today is ethanol, but ethanol has major shortcomings including the low energy return compared to gasoline, high vaporizability, as well as miscibility with water. Alternative biofuels, such as n-butanol, have characteristics that are closer to current gasoline and could perform better as a replacement. Additionally, crotyl alcohol and 1,3-butanediol are commodity chemicals that could see significant application as feedstocks for butadiene used in rubber production.

[0185] A biosynthetic pathway for the production of n-butanol, crotyl alcohol, and 1,3-butanediol in E. coli have been previously developed. Applicants sought to explore methods of recalibrating these pathways to improve the production of these commodity chemicals in host cells.

### Materials and Methods

[0186] Commercial Materials

[0187] Luria-Bertani (LB) Broth Miller, LB Agar Miller, and Terrific Broth (TB) were purchased from EMD Biosciences (Darmstadt, Germany). Carbenicillin (Cb), isopropyl-β-D-thiogalactopyranoside (IPTG), phenylmethanesulfonyl fluoride (PMSF), tris(hydroxymethyl)aminomethane hydrochloride (Tris-HCl), sodium chloride, dithiothreitol (DTT), kanamycin (Km), ethyl acetate and ethylene diamine tetraacetic acid disodium dihydrate (EDTA), were purchased from Fisher Scientific (Pittsburgh, Pa.). Coenzyme A trilithium salt (CoA), acetyl-CoA, nicotinamide adenine dinucleotide reduced form dipotassium salt (NADH), β-mercaptoethanol, sodium phosphate dibasic hepthydrate, and N,N,N′,N′-tetramethyl-ethane-1,2-diamine (TEMED) were purchased from Sigma-Aldrich (St. Louis, Mo.). Acrylamide/Bis-acrylamide (30%, 37.5:1), electrophoresis grade sodium dodecyl sulfate (SDS), Bio-Rad protein assay dye reagent concentrate and ammonium persulfate were purchased from Bio-Rad Laboratories (Hercules, Calif.). Restriction enzymes, T4 DNA ligase, Phusion DNA polymerase, T5 exonuclease, and Taq DNA ligase were purchased from New England Biolabs (Ipswich, Mass.). Deoxynucleotides (dNTPs) and Platinum Taq High-Fidelity polymerase (Pt Taq HF) were purchased from Invitrogen (Carlsbad, Calif.). PageRuler™ Plus prestained protein ladder was purchased from Fermentas (Glen Burnie, Md.). Oligonucleotides were purchased from Integrated DNA Technologies (Coralville, Iowa), resuspended at a stock concentration of 100 μM in 10 mM Tris-HCl, pH 8.5, and stored at either 4° C. for immediate use or −20° C. for longer term use. DNA purification kits and Ni-NTA agarose were purchased from Qiagen (Valencia, Calif.). Amicon Ultra 10,000 centrifugal concentrators were purchased from EMD Millipore (Billerica, Mass.).

[0188] Bacterial Strains

[0189] E. coli DH10B-T1^{R} and BL21(de3)T1^{R} were used for DNA construction and heterologous protein production, respectively. Strains, plasmids, and oligonucleotides used herein are described in detail in Table 1, Table 2, and Table 3.

[0190] Gene Naming Conventions

[0191] ALDH genes referred to throughout this Example are named according to the order of their appearance on the x-axis in FIG. 7. For example, GI 4884855 is also referred to as ALDH1 (first gene on the x-axis), and GI 150018649 is also referred to as ALDH16 (sixteenth gene on the x-axis). Similarly, ADH genes referred to throughout this Example are named according to the order of their appearance on the x-axis in FIG. 10. For example, A0RQF7_CAMFF is also referred to as ADH1 (first gene on the x-axis), and GI Q3A1K9_PELCD is also referred to as ADH16 (sixteenth gene on the x-axis).

[0192] Gene and Plasmid Construction

[0193] Gibson assembly was used to carry out plasmid construction. All PCR amplifications were carried out with Phusion or Platinum Taq High Fidelity DNA polymerases. All constructs were verified by sequencing (Quintara Biosciences; Berkeley, Calif.).

[0194] pET23a-His₆TEV-aldh3.

[0195] Aldh3 was amplified from pCDF3-aldh3 using the primers HisTev_aldh3 GF1 and HisTev_aldh3 GR1 and inserted into the SfoI-XhoI restriction sites of pET23a to generate pET23a-His₆TEV_aldh3.

[0196] pET23a-His₆TEV-aldh16.

[0197] Aldh16 was amplified from pCDF3-aldh16 using the primers HisTev_aldh16 GF1 and HisTev_aldh16 GR1 and inserted into the SfoI-XhoI restriction sites of pET23a to generate pET23a-His₆TEV_aldh16.

[0198] pCWori-strep_aldh3.

[0199] Aldh3 was amplified from pCDF3-aldh3 using the primers strep_aldh3 GF1 and aldh3 GR1 and inserted into the NdeI-HindIII restriction sites of pCWori to generate pCWori-strep_aldh3.

[0200] pCWori-strep_aldh16.

[0201] Aldh16 was amplified from pCDF3-aldh16 using the primers strep_aldh16 GF1 and aldh16 GR1 and inserted into the NdeI-HindIII restriction sites of pCWori to generate pCWori-strep_aldh16.

[0202] pT533-phaA.phaB.

[0203] The oligos trc.crt delete GO1 and trc.crt delete GO2 were inserted into the XbaI restriction site of pT5T33-phaA.phaB-crt to generate pT533-phaA.phaB.

[0204] pT533-phaA.HBD.

[0205] The oligos trc.crt delete GO1 and trc.crt delete GO2 were inserted into the XbaI restriction site of pT5T33-phaA.HBD-crt to generate pT533-phaA.HBD.

[0206] pCDF3-ter.aldh1-16.

[0207] Different pCDF3-ter plasmids were constructed that contained an alcohol dehydrogenase (ALDH). As 16 different ALDHs were tested, 16 different plasmids, each with a different ALDH, were constructed.

[0208] pCDF3-aldh1-16.

[0209] The oligos ter delete GO5 and ter delete GO6 were inserted into the BamHI-EcoRI restriction sites of pCDF3-ter.aldh1-16 to generate pCDF3-aldh1-16.

[0210] Bioinformatics Search for Aldehyde Dehydrogenases

[0211] A bioinformatics search was conducted to identity putative aldehyde dehydrogenases.

[0212] Bioinformatics Search for Alcohol Dehydrogenases

[0213] The Fe-ADH sequence family (PF00465) was filtered using cd-hit (http://www.bioinformatics.org/cd-hit/) to remove sequences greater than 90% identical. The remaining sequences were blasted all-vs-all using BLAST and the resulting sequence similarity network was visualized in Cytoscape at various E-value cutoffs. Alcohol dehydrogenases of known substrate specificity were overlaid on the network and sequences were randomly sampled from adjacent sequence clusters.

[0214] Expression of His-Tagged Proteins

[0215] TB (1 L) containing carbenicillin (50 μg/mL) in a 2.8 L Fernbach baffled shake flask was inoculated to OD₆₀₀=0.05 with an overnight TB culture of freshly transformed E. coli containing the appropriate overexpression plasmid. The cultures were grown at 37° C. at 200 rpm to OD₆₀₀=0.6 to 0.8 at which point cultures were cooled on ice for 20 min, followed by induction of protein expression with 1 mM IPTG and overnight growth at 16° C. Cell pellets were harvested by centrifugation at 9,800×g for 7 min and resuspended at 20 mL/L of culture with Buffer A (50 mM sodium phosphate, 300 mM sodium chloride, 20 mM imidazole, 0.5 mM EDTA, pH 8.0) supplemented with 2 mg/mL lysozyme and 2 μL/50 mL final volume Benzonase and frozen at −80° C.

[0216] Purification of His-Tagged Proteins

[0217] Frozen cell suspensions were thawed and frozen twice before finally thawing and adding 0.5 mM PMSF as a 50 mM stock solution in ethanol dropwise. The cell suspension was lysed at with a Misonix 3000 probe sonicator at full power with a 15 second on, 60 second off cycle for a total sonication time of 2.5 minutes. The lysate was centrifuged at 15,300×g for 20 min at 4° C. to separate the soluble and insoluble fractions. DNA was precipitated in the soluble fraction by addition of 1% streptomycin sulfate as a 20% w/v stock solution added dropwise. The precipitated DNA was removed by centrifugation at 15,300×g for 20 min at 4° C. The lysate was loaded onto a Ni-NTA agarose column (Qiagen, 1 mL resin/L expression culture) by gravity flow. The column was washed with 20 column volumes Buffer A. The protein was then eluted with 250 mM imidazole in Buffer A.

[0218] Fractions containing the target protein were pooled by A_{280 nm} and supplemented with 100 mM DTT to 1 mM final. TEV protease (QB3 Macrolab) was added at a 1:20 ratio w/w. Protein was then placed in 10 kDa MWCO dialysis tubing in 1.8 L Buffer A with 1 mM DTT and dialyzed overnight at 4° C.

[0219] Dialyzed protein was loaded onto the previous Ni-NTA agarose column equilibrated with Buffer A and the flowthrough was collected. This procedure was repeated two times and the column was washed with 1 column volume of buffer A. The pooled flowthrough was concentrated in an Amicon Ultra 10,000 MWCO concentrator to a final volume of 2 mL. Concentrated protein was loaded on a Superdex 200 SEC column (GE Healthcare; Piscataway, N.J.) connected to an ÄKTApurifier FPLC (1 mL/min; GE Healthcare). Fractions containing ALDH protein by A₂₈₀ were pooled and concentrated in an Amicon Ultra 10,000 MWCO concentrator. Concentrated protein was supplemented with glycerol to 10% v/v and stored at −80° C.

[0220] Crystallization and Structure Determination of GA-ALDH3 and GA-ALDH16

[0221] Protein crystals were obtained using the sitting drop vapor diffusion method by combining equal volumes of a 10 mg/mL protein solution and a reservoir solution [0.2 M tri-sodium citrate (pH 7.5) and 20% (w/v) polyethylene glycol 3350]. Crystals grew within 2 days and were cryoprotected by being briefly soaked in a solution containing 75% reservoir solution and 25% ethylene glycol followed by flash-freezing in liquid nitrogen. Data were collected at Beamline 8.3.1 at the Advanced Light Source (Lawrence Berkeley National Laboratory, Berkeley, Calif.). Data sets for native crystals were collected at a wavelength of 1.116 Å. Data sets were processed and merged with XDS and XSCALE. Phases were determined by molecular replacement using Phenix AutoMR and AutoBuild to build a near-complete chain trace of each crystal. Iterative cycles of Phenix AutoRefine and manual refinement in Coot32 were used to generate the final model.

[0222] Expression of Strep-Tagged Proteins

[0223] TB (1 L) containing carbenicillin (50 μg/mL) in a 2.8 L Fernbach baffled shake flask was inoculated to OD₆₀₀=0.05 with an overnight TB culture of freshly transformed E. coli containing the appropriate overexpression plasmid. The cultures were grown at 37° C. at 200 rpm to OD₆₀₀=0.6 to 0.8 at which point cultures were cooled on ice for 20 min, followed by induction of protein expression with 1 mM IPTG and overnight growth at 16° C. Cell pellets were harvested by centrifugation at 9,800×g for 7 min and resuspended at 20 mL/L of culture with Buffer W (100 mM Tris-HCl, 150 mM sodium chloride, 1 mM EDTA, pH 8.0) supplemented with 2 mg/mL lysozyme and 2 μL/50 mL final volume Benzonase and frozen at −80° C.

[0224] Purification of Strep-Tagged Proteins

[0225] Frozen cell suspensions were thawed and frozen twice before finally thawing and adding 0.5 mM PMSF as a 50 mM stock solution in ethanol dropwise. The cell suspension was lysed at with a Misonix 3000 probe sonicator at full power with a 15 second on, 60 second off cycle for a total sonication time of 2.5 minutes. The lysate was centrifuged at 15,300×g for 20 min at 4° C. to separate the soluble and insoluble fractions. DNA was precipitated in the soluble fraction by addition of 0.5% polyethylenimine as a 15% v/v stock solution added dropwise. The precipitated DNA was removed by centrifugation at 15,300×g for 20 min at 4° C. The lysate was loaded onto a Strep-tactin Superflow High Capacity column (IBA, 1 mL resin/L expression culture) by gravity flow. The column was washed with 20 column volumes Buffer W. The protein was then eluted with 2.5 mM desthiobiotin in Buffer W. Fractions containing ALDH protein by A₂₈₀ were pooled and concentrated in an Amicon Ultra 10,000 MWCO concentrator. Concentrated protein was supplemented with glycerol to 10% v/v and stored at −80° C.

[0226] Enzyme Assays

[0227] Activity of ALDH proteins was measured by monitoring the oxidation of NADH at 340 nm at 30° C. The assay mixture (400 μL) contained 100 μM NADH in 100 mM Tris 1 mM DTT pH 7.5. The reaction was initiated by the addition of substrate. Kinetic parameters (k_{cat}, K_{M}) were determined by fitting the data using Microcal Origin to the equation: vₒ=vₘₐₓ [S]/(K_{M}+[S]), where v is the initial rate and [S] is the substrate concentration. Data are reported as mean±s.e. (n=3) unless otherwise noted with standard error derived from the nonlinear curve fitting. Error bars on graphs represent mean±s.d. (n=3). Error in k_{cat}/K_{M} is calculated by propagation of error from the individual kinetic parameters.

[0228] Synthesis of (S)- and (R)-3-hydroxybutyryl-CoA

[0229] His6-Hbd (35 μg/ml) or His6-PhaB (17.5 μg/ml) was incubated with acetoacetyl-CoA (12.5 mM) and NADH or NADPH (125 mM) in 100 mM Tris-HCl, pH 7.5 (300 μL) for 60 min at 30° C. to produce (5)- and (R)-3-hydroxybutyryl-CoA, respectively. Both products were isolated by RP-HPLC using an Eclipse XDB C18 column (5 μm, 9.4×250 mm, Agilent) using a 0-100% acetonitrile gradient over 25 min with 10 mM acetic acid, pH 4.0 as the mobile phase. The (S)-3-hydroxybutyryl-CoA was further purified by RP-HPLC using an Eclipse XDB C-8 column (3.5 μm, 3.0×150 mm, Agilent) using a 0-100% acetonitrile gradient over 25 min with 20 mM triethylamine, 10 mM acetic acid, pH 4.0 as the mobile phase. Purified (S)- and (R)-3-hydroxybutyryl-CoA were lyophilized following each purification step and analyzed by LC-MS using an Eclipse XDB C18 column (5 μm, 4.6×150 mm, Agilent) using a 0-100% acetonitrile gradient over 25 min with 10 mM acetic acid, pH 4.0 as the mobile phase. ESIMS (M-H) calculated for C25H41O18N7P3S m/z, 852.1, found 852.1 ((S)-3-hydroxybutyryl-CoA) and 852.1 ((R)-3-hydroxybutyryl-CoA).

[0230] Cell Culture

[0231] E. coli strains were transformed by electroporation using the appropriate plasmids. A single colony from a fresh transformation was then used to seed an overnight culture grown in Terrific Broth (TB) (EMD Biosciences) supplemented with 1.5% (w/v) glucose and appropriate antibiotics at 37° C. in a rotary shaker (200 r.p.m.). Antibiotics were used at a concentration of 50 μg ml⁻¹ for strains with a single resistance marker. For strains with multiple resistance markers, kanamycin and chloramphenicol were used at 25 μg ml⁻¹ and carbenicillin was used at 50 μg ml⁻¹.

[0232] In Vivo Production of Butanol, 1,3-Butanediol, Crotyl Alcohol, and 4-Hydroxy-2-Butanone

[0233] Overnight cultures of freshly transformed E. coli strains were grown for 12-16 h in TB at 37° C. and used to inoculate TB (50 ml) with glucose replacing the standard glycerol supplement (1.5% (w/v)) glucose for aerobic cultures and 2.5% (w/v) glucose for anaerobic cultures) and appropriate antibiotics to an optical density at 600 nm (OD₆₀₀) of 0.05 in a 250 mL-baffled flask or a 250 mL-baffled anaerobic flask. The cultures were grown at 37° C. in a rotary shaker (200 r.p.m.) and induced with IPTG (1.0 mM) at OD₆₀₀=0.35-0.45. At this time, the growth temperature was reduced to 30° C., and the culture flasks were sealed with Parafilm M (Pechiney Plastic Packaging) to prevent product evaporation for aerobic cultures. Anaerobic cultures were sealed and the headspace was sparged with argon for 5 minutes immediately follow induction. Aerobic cultures were unsealed for 10 to 30 min every 24 h then resealed with Parafilm M, and additional glucose (1% (w/v)) was added 1 day post-induction. Samples were quantified after 3 d of cell culture.

[0234] Quantification of n-Butanol

[0235] Samples (2 ml) were removed from cell culture and cleared of biomass by centrifugation at 20,817 g for 2 min using an Eppendorf 5417R centrifuge. The supernatant or cleared medium sample was then mixed in a 9:1 ratio with an aqueous solution containing the isobutanol internal standard (10,000 mg l⁻¹). These samples were then analyzed on a Trace GC Ultra (Thermo Scientific) using an HP-5MS column (0.25 mm×30 m, 0.25 μM film thickness, J & W Scientific). The oven program was as follows: 75° C. for 3 min, ramp to 300° C. at 45° C. min⁻¹, 300° C. for 1 min. n-Butanol was quantified by flame ionization detection (FID) (flow: 350 ml min⁻¹ air, 35 ml min⁻¹ H2 and 30 ml min⁻¹ helium). Samples containing n-butanol levels below 500 mg 1⁻¹ were requantified after extraction of the cleared medium sample or standard (500 μl) with toluene (500 μl) containing the isobutanol internal standard (100 mg 1⁻¹) using a Digital Vortex Mixer (Fisher) for 5 min set at 2,000. The organic layer was then quantified using the same GC parameters with a DSQII single-quadrupole mass spectrometer (Thermo Scientific) using single-ion monitoring (m/z 41 and 56) concurrent with full scan mode (m/z 35-80). Samples were quantified relative to a standard curve of 2, 4, 8, 16, 31, 63, 125, 250, 500 mg 1⁻¹ n-butanol for MS detection or 125, 250, 500, 1,000, 2,000, 4,000, 8,000 mg 1⁻¹ n-butanol for FID detection. Standard curves were prepared freshly during each run and normalized for injection volume using the internal isobutanol standard (100 or 1,000 mg 1⁻¹ for MS and FID, respectively).

[0236] Quantification of Crotyl Alcohol

[0237] Samples (2 ml) were removed from cell culture and cleared of biomass by centrifugation at 20,817 g for 2 min using an Eppendorf 5417R centrifuge. The cleared medium sample or standard (500 μl) was extracted with toluene (500 μl) containing the isobutanol internal standard (100 mg 1⁻¹) using a Digital Vortex Mixer (Fisher) for 5 min set at 2,000. The organic layer was then analyzed on a Trace GC Ultra (Thermo Scientific) using an HP-5MS column (0.25 mm×30 m, 0.25 μM film thickness, J & W Scientific). The oven program was as follows: 75° C. for 4 min, ramp to 300° C. at 45° C. min⁻¹, 300° C. for 2 min. Crotyl alcohol was detected with a DSQII single-quadrupole mass spectrometer (Thermo Scientific) using single-ion monitoring (m/z 29, 41, 43, and 57) concurrent with full scan mode (m/z 37-58). Samples were quantified relative to a standard curve of 2, 4, 8, 16, 31, 63, 125, 250, 500 mg 1⁻¹ crotyl alcohol for MS detection. Standard curves were prepared freshly during each run and normalized for injection volume using the internal isobutanol standard (100 mg l⁻¹).

[0238] Quantification of 1,3-Butanediol

[0239] Samples (2 ml) were removed from cell culture and cleared of biomass by centrifugation at 20,817 g for 2 min using an Eppendorf 5417R centrifuge. The cleared medium samples, or standards prepared in TB medium, were diluted 1:100 into water and filtered through a 0.22 μm filter (EMD Millipore MSGVN2210). The samples were analyzed on an Agilent 1290 HPLC (Agilent) using a Rezex ROA-Organic Acid H+(8%) column (150×4.6 mm, Phenomenex) with isocratic elution using 0.5% formic acid (0.3 mL/min, 55° C.). Samples were detected with an Agilent 6460C triple quadrupole MS with Jet Stream ESI source (Agilent), operating in positive MRM mode (91-73 transition, fragmentor 50 V, collision energy 0 V, cell accelerator voltage 7 V, delta EMV+400). Samples were quantified relative to a standard curve of 31, 63, 125, 250, 500, 1000, 2000, 4000 mg l⁻¹ 1,3-butanediol.

[0240] Quantification of 4-Hydroxy-2-Butanone

[0241] Samples (2 ml) were removed from cell culture and cleared of biomass by centrifugation at 20,817 g for 2 min using an Eppendorf 5417R centrifuge. The cleared medium samples, or standards prepared in TB medium, were diluted 1:100 into water and filtered through a 0.22 μm filter (EMD Millipore MSGVN2210). The samples were analyzed on an Agilent 1290 HPLC (Agilent) using a Rezex ROA-Organic Acid H+(8%) column (150×4.6 mm, Phenomenex) with isocratic elution using 0.5% formic acid (0.3 mL/min, 55° C.). Samples were detected with an Agilent 6460C triple quadrupole MS with Jet Stream ESI source (Agilent), operating in positive MRM mode (89-71 transition, fragmentor 50 V, collision energy 0 V, cell accelerator voltage 7 V, delta EMV+400). Samples were quantified relative to a standard curve of 31, 63, 125, 250, 500, 1000, 2000, 4000 mg l⁻¹ 1,3-butanediol.

TABLE 1
Strains

| Strain | Genotype |
|---|---|
| BL21(de3) | F⁻ ompT gal dcm lon hsdS_{B}(r_{B}⁻ m_{B}⁻) λ(DE3 |
| | [lacI lacUV5-T7 gene 1 ind1 sam7 nin5]) |
| DH1 | endA1 recA1 gyrA96 thi-1 glnV44 relA1 hsdR17(rK⁻ |
| | mK⁺) λ⁻ |
| MC1.24 | endA1 recA1 gyrA96 thi-1 glnV44 relA1 hsdR17(rK⁻ |
| | mK⁺) λ⁻ ΔadhE ΔldhA Δack-pta ΔpoxB |
| | ΔfrdBC |

TABLE 2
Plasmids

| Plasmid | Description |
|---|---|
| pET23a-His₆TEV-aldh3 | his₆TEV-aldh3 (T7), lacI, Cb^{r}, ColE1 |
| pET23a-His₆TEV-aldh16 | his₆TEV-aldh16 (T7), lacI, Cb^{r}, ColE1 |
| pCWori-Strep_aldh3 | strep-aldh3 (double Tac), lacI, Cb^{R}, ColE1 |
| pCWori-Strep_aldh16 | strep-aldh3 (double Tac), lacI, Cb^{R}, ColE1 |
| pT533-phaA.phaB | phaA.phaB (T5), lacIq, Cm^{R}, p15a |
| pT533-phaA.HBD | phaA.phaB (T5), lacIq, Cm^{R}, p15a |
| pCDF3-ter.aldh1-16 | ter.aldh1-16 (double Tac), lacIq, Sp^{R}, |
| | CloDF13cop3 |
| pCDF3-aldh1-16 | aldh1-16 (double Tac), lacI, Sp^{R}, |
| | CloDF13cop3 |
| pCWO.trc-ter-aldh16.adh1-14 | ter (double Tac), aldh16.adh1-14 (Trc), |
| | lacIq, Cb^{R}, ColE1 |
| pCWO.trc-ter-aldh16.dhaT1-8 | ter (double Tac), aldh16.dhaT1-8 (Trc), |
| | lacIq, Cb^{R}, ColE1 |

TABLE 3
Oligonucleotide Sequences

| Name | SEQ ID No. | Sequence |
|---|---|---|
| trc.crt delete GO1 | 267 | caagcttgcatgcctgcaggtcgactctagattagcccatgtgcaggccaccgttcaggg |
| trc.crt delete GO2 | 268 | gaacggtggcctgcacatgggctaatctagagtcgacctgcaggcatgcaagcttggctg |
| phaB SF1 | 269 | gtgcatggctgtcttccg |
| HBD SF1 | 270 | gcacacgctgctgaaaaag |
| aldh3 SF1 | 271 | acgcaattatcaaacacccgtcc |
| aldh6 SF1 | 272 | ggaagagccgtctattgagaacac |
| aldh7 SF1 | 273 | gcacccgtacatcaagctgc |
| HisTev_aldh16 GF1 | 274 | tcatcatgagaatctctacttccagggtaccggcgccatgaataaagacaccctgattcc |
| HisTev_aldh16 GR1 | 275 | gttagcagccggatctcagtggtggtggtggtggtgctcgagtttagccggccagaacac |
| HisTev_aldh3 GF1 | 276 | catcatgagaatctctacttccagggtaccggcgccatgattaaggacactctcgtaagc |
| HisTev_aldh3 GR1 | 277 | agcagccggatctcagtggtggtggtggtggtgctcgagtttaacccgccagaacacaac |
| HisTev_aldh6 GF1 | 278 | catcatcatgagaatctctacttccagggtaccggcgccatgaaagagggtgtaattcgc |
| HisTev_aldh6 GR1 | 279 | tagcagccggatctcagtggtggtggtggtggtgctcgagtttaacgaatgctaaaggcg |
| HisTev_aldh7 GF1 | 280 | catcatcatcatgagaatctctacttccagggtaccggcgccatggaacgcaacttgtcg |
| HisTev_aldh7 GR1 | 281 | agcagccggatctcagtggtggtggtggtggtgctcgagtttaaccggccagaacgcaac |
| ter delete GO5 | 282 | agcggataacaatttcacacaggaaacaggatccgaattcaaaaaaggaggtaaaaaatg |
| ter delete GO6 | 283 | cattttttacctccttttttgaattcggatcctgtttcctgtgtgaaattgttatccgct |
| aldh3 GR1 | 284 | actttgaaccacagcattaggacctcctctggtaagctctagattaacccgccagaacac |
| aldh6 GR1 | 285 | tttgaaccacagcattaggacctcctctggtaagctctagattaacgaatgctaaaggcg |
| aldh7 GR1 | 286 | actttgaaccacagcattaggacctcctctggtaagctctagattaaccggccagaacgc |
| aldh16 GF4 | 287 | gaagataagattctgaaacatgagc |
| aldh16.yqhD GR1 | 288 | agattaaagttgttcatctttacctcctgatagaagtctcgagttagccggccagaacac |
| aldh16.yqhD GF1 | 289 | tggccggctaactcgagacttctatcaggaggtaaagatgaacaactttaatctgcacac |
| yqhD GR2 | 290 | tcatgtttgacagcttatcatcgataagcttgagctcttagcgggcggcttcgtatatac |
| aldh16.fucO GR1 | 291 | atcattctgttagccattgtctccccccctgcgccggctcgagttagccggccagaacac |
| aldh16.fucO GF1 | 292 | ggccggctaactcgagccggcgcagggggggagacaatggctaacagaatgattctgaac |
| fucO GR2 | 293 | gctcatgtttgacagcttatcatcgataagcttgagctcttaccaggcggtatggtaaag |
| aldh16.dhaT GR1 | 294 | ttagccggccagaacac |
| yqhD GF1 | 295 | gtaacttcacgcgccaacgtcgttgtgttctggccggctaactcgagacttctatcaggaggtaaa |
| | | gatgaacaactttaatctgcacac |
| rrnB-1 GF1 | 296 | ggtattaactacgaggcagaagttg |
| rrnB-1 GR1 | 297 | gttccctactctcgcatgggCTgaccccacactaccatcg |
| rrnB-2 GF1 | 298 | cgatggtagtgtggggtcAGcccatgcgagagtagggaac |
| rrnB-2 GR1 | 299 | cagcttccgatggctgcc |
| BsaI delete GO1 | 300 | ctgataaatctggagccggtgagcgtgggtGAcgcggtatcattgcagcactggggccag |
| BsaI delta GO2 | 301 | ctggccccagtgctgcaatgataccgcgTCacccacgctcaccggctccagatttatcag |

### Results

[0242] Efforts to Maximize Alcohol Production

[0243] While developing improved or more efficient biosynthetic pathways for the production of n-butanol, crotyl alcohol, and 1,3-butanediol, it was discovered that the final enzyme in each pathway, AdhE2, was catalyzing significant production of the undesired side product ethanol. Formation of this side product derives from a lack of substrate specificity by AdhE2 for C4 substrates to the exclusion of smaller substrates. AdhE2 is an enzyme that acts as a bifunctional alcohol and aldehyde dehydrogenase. AdhE2 reduces acyl-CoAs to aldehydes via the aldehyde dehydrogenase (ALDH) domain, and aldehydes are subsequently reduced to alcohols via the alcohol dehydrogenase (ADH) domain. Without wishing to be bound by theory, it is thought that the mechanism of reduction involves substrate channeling of the volatile and reactive aldehyde intermediate between the two linked domains of the enzyme (FIG. 1). Further, and without wishing to be bound by theory, it is thought that this substrate channeling mechanism both shields the cell from a toxic intermediate as well as ensuring efficient carbon flow through a high-flux fermentation pathway. However, as discussed above, AdhE2 allows for significant production of the undesired ethanol side product. Applicants sought to explore ways to minimize production of the ethanol side product, as any ethanol produced decreases the yield of the desired product and increases downstream separation costs.

[0244] To maximize AdhE2 for C4 substrate specificity, a phylogenetics-informed mutagenesis strategy was used in an attempt to modify the substrate preference of AdhE2 for C4 substrates. E. coli cells were genetically engineered to contain an n-butanol biosynthetic pathway (FIG. 6A) using either WT AdhE2 or a particular AdhE2 variant subjected to mutagenesis according to the phylogenetics-informed mutagenesis strategy. The AdhE2 variants contained targeted amino acid substitutions. However, this approach proved ineffective, as no variant produced a significantly better butanol:ethanol ratio in the host cells (FIG. 2A and FIG. 2B).

[0245] Further, a phylogenetic search for members of the AdhE2 superfamily was conducted to select sequences that would preferentially act on C4 substrates. E. coli cells were genetically engineered to contain an n-butanol biosynthetic pathway (FIG. 6A) and containing AdhE2 (WT) or various AdhE2 homologs (AdhE2 homolog GI numbers on x-axis of FIG. 3). Surprisingly, no members of the bifunctional AdhE2 family showed improved C4 substrate specificity (FIG. 3).

[0246] However, through the process of screening for improved AdhE2 sequences, it was discovered that independent monofunctional enzymes could robustly enable production of butanol while largely eliminating undesirable ethanol production seen from AdhE2. As can be seen in FIG. 3, only E. coli expressing a monofunctional aldehyde dehydrogenase (GI 150018649) produce a favorable butanol:ethanol ratio. This result was unexpected because, without wishing to be bound by theory, it is thought that independent monofunctional aldehyde and alcohol dehydrogenases require the reactive and volatile aldehyde substrate to freely diffuse from one enzyme to the next instead of the direct channeling mechanism likely employed by the bifunctional AdhE2. Prior to this discovery, it was thought that a high-flux fermentation pathway that released a volatile or reactive intermediate would both limit the yield of the pathway and prove toxic to the host cell. However, this result was not observed, and further, this split aldehyde dehydrogenase and alcohol dehydrogenase approach has the added benefit of enabling combinations of aldehyde and alcohol dehydrogenases tailored for the production of each product.

[0247] Exploring Monofunctional Aldehyde and Alcohol Dehydrogenases in Alcohol Production

[0248] To further explore the potential for expressing monofunctional aldehyde and alcohol dehydrogenases in host cells for the production of alcohols, various aldehyde and alcohol dehydrogenases were purified and isolated to investigate their in vitro kinetic behavior with various C4 and C2 substrates. In particular, the monofunctional aldehyde dehydrogenase identified in FIG. 3 above (GI 150018649, also referred to as ALDH16) was purified (FIG. 4A and FIG. 4B) and the in vitro kinetic behavior of a purified Strep-ALDH16 protein with various C4 and C2 substrates was tested. The results of this analysis are presented in Table 4.

TABLE 4
In Vitro Kinetics of Aldehyde/Alcohol Dehydrogenases

| | Substrate | k_{cat} (s⁻¹) | K_{M} (μM) | k_{cat}/K_{M} (M⁻¹ s⁻¹) |
|---|---|---|---|---|
| AdhE2- | butyryl- | 1.2 ± 0.1 | 10 ± 1 | (1.1 ± 0.1) × 10⁵ |
| ALDH | CoA | | | |
| | acetyl- | 1.3 ± 0.1 | 100 ± 10 | (1.3 ± 0.2) × 10⁴ |
| | CoA | | | |
| AdhE2- | butyral- | 2.9 ± 0.1 | 4000 ± 400 | (7.0 ± 0.2) × 10² |
| ADH | dehyde | | | |
| | acetal- | 5.6 ± 0.1 | 4500 ± 300 | (1.2 ± 0.1) × 10³ |
| | dehyde | | | |
| ALDH16 | butyryl- | 0.11 ± 0.01 | 14 ± 2 | (7.3 ± 0.01) × 10³ |
| | CoA | | | |
| | acetyl- | 0.05 ± 0.01 | 454 ± 98 | (0.1 ± 0.01) × 10³ |
| | CoA | | | |

[0249] From Table 4, it is seen that the ALDH domain of AdhE2 displays a modest 8.5-fold preference for butyryl-CoA over acetyl-CoA. Furthermore, the K_{M} of 100±10 μM for acetyl-CoA is well below the physiological concentration of acetyl-CoA, thus enabling significant ethanol production. This is in contrast to one of the monofunctional aldehyde dehydrogenases characterized in this study, ALDH16, which exhibits a 73-fold preference for butyryl-CoA over acetyl-CoA and a 5-fold higher K_{M} for acetyl-CoA. The ADH domain of AdhE2 displays a slight 1.7-fold preference for acetaldehyde over butyraldehyde. However, this result is of little consequence because the overall specificity of any ALDH/ADH pair will be primarily dictated by the upstream ALDH. This enables a tailored ALDH with a given substrate specificity to be paired with a range of ADHs that may be relatively less discriminatory in substrate preference; the ALDH acts as a gatekeeper and only makes a preferred aldehyde intermediate available to an ADH.

[0250] To demonstrate that a biosynthetic pathway incorporating split monofunctional aldehyde/alcohol dehydrogenases can act as a high-flux fermentation pathway, a more effective butanol production pathway in E. coli was constructed using ALDH16 as the monofunctional aldehyde dehydrogenase and the AdhE2-ADH domain as the monofunctional alcohol dehydrogenase (FIG. 5). The corresponding AdhE2-based pathway is capable of producing 4.5 g/L butanol and 3 g/L ethanol. Replacement of AdhE2 with only ALDH16 decreases production to 1 g/L butanol and 0.5 g/L ethanol, but inclusion of the AdhE2-ADH domain restores robust butanol production to nearly 4 g/L with no additional ethanol production. Improved gene expression in the pathway enables greater than 5 g/L butanol production while maintaining minimal ethanol production of 0.5 g/L (FIG. 5). This shows that a robust fermentation pathway can be developed with monofunctional aldehyde/alcohol dehydrogenases despite the release of a volatile and reactive aldehyde intermediate.

[0251] As discussed above, the initial butanol production pathway (adhE2) utilized a bifunctional aldhehyde/alcohol dehydrogenase that lacked substrate specificity and produced significant quantities of ethanol. However, upon discovering a monofunctional aldehyde dehydrogenase that was specific for C4 substrates (aldh16), this pathway was completed with a monofunctional alcohol dehydrogenase (aldh16.adh) and the expression of this new pathway architecture was improved (trc.aldh16.adh). The butanol production from this more efficient pathway exceeds that from the adhE2 pathway while decreasing ethanol production to a minimal level (FIG. 5), highlighting the unexpected result that a high-flux pathway can be constructed despite proceeding through a volatile and reactive aldehyde intermediate.

[0252] Further, a genetically engineered strain was produced where production of 8 g/L butanol was achieved with this more effective set of aldehyde/alcohol dehydrogenases. This particular strain contains the biosynthetic components to produce butanol and is further a quintuple knockout E. coli strain (ΔadhE ΔldhA ΔackA-pta ΔpoxB ΔfrdBC) with overexpression of the pyruvate dehydrogenase complex and grown under anaerobic conditions.

[0253] Further, to demonstrate that a biosynthetic pathway incorporating split monofunctional aldehyde/alcohol dehydrogenases can act as a high-flux fermentation pathway for multiple alcohols, pathways for the production of n-butanol, crotyl alcohol, or 1,3-butanediol were constructed. The specific enzymes used in the production of each specific alcohol are presented in FIG. 6A-FIG. 6C. The genes were synthesized and their codon usage optimized for expression in E. coli. The genes in the pathways include phaA (acetoacetyl-CoA thiolase from Ralstonia eutrophus, GI 498509665), hbd (3-hydroxybutyryl-CoA dehydrogenase from Aeromonas caviae, GI 499268602), crt (crotonase from Clostridium acetobutylicum, GI 15895969), ter (trans-enoyl-CoA reductase from Treponema denticola, GI 488758537), aldh (aldehyde dehydrogenase from various species), and adh (alcohol dehydrogenase from various species).

[0254] The results of alcohol production in E. coli expressing the various biosynthetic pathways depicted in FIG. 6A-FIG. 6C are presented in FIG. 7. E. coli were engineered to contain either the pathway in FIG. 6A for n-butanol production, the pathway in FIG. 6B for crotyl alcohol production, or the pathway in FIG. 6C for 1,3-butanediol production. Each cell line contained one of the various selected aldehyde dehydrogenases (See x-axis of FIG. 7). It was seen that different members of the aldehyde dehydrogenase family can be used for the production of butanol, 1,3-butanediol, and crotyl alcohol. Additionally, the stereochemistry of these products can be precisely controlled through the selection of enzymes upstream of the aldehyde dehydrogenase. Co-expression of these genes in E. coli and analysis of the pathway has shown that the enzymes are functional and capable of producing butanol, 1,3-butanediol, and crotyl alcohol. Each aldehyde dehydrogenase exhibits a preferred substrate and/or different product profile (FIG. 7), and substrate preference and/or product profile can be further modified through engineered recombination of the naturally present diversity within the collection. The first generation of genetically engineered hosts was capable of producing butanol at titers of 1.6 g/L, 1,3-butanediol at titers of 0.8 g/L, or crotyl alcohol at titers of 6 mg/L under anaerobic conditions.

[0255] In addition to exploring the diversity of different aldehyde dehydrogenases with respect to the production of various alcohols, the diversity of alcohol dehydrogenases was also explored, especially with respect to the production of 1,3-butanediol. Similarity networks were created between alcohol dehydrogenases and 1,3-propanediol dehydrogenases to identify potential alcohol dehydrogenases for production of 1,3-butanediol (FIG. 8). Sixteen alcohol dehydrogenases were selected from the resulting clusters for further functional analysis.

[0256] To investigate the impact of different alcohol dehydrogenases on 1,3-butanediol production, E. coli MC1.24 (DH1 ΔadhE ΔldhA Δack-pta ΔpoxB ΔfrdBC) was transformed with pT533-phaA.phaB and pCWO.trc-aldh16.adh 1-16, where each plasmid contained one of the sixteen adh genes identified from the network analysis (each E. coli line contained only one of the recombinant adh genes 1-16), and cultured anaerobically for 3 days. Culture supernatant was harvested and 1,3-butanediol titers were quantified by GC-MS. Retention time and fragmentation patterns from the culture supernatants were compared with a commercial authentic standard (FIG. 9). As was seen with the diverse set of aldehyde dehydrogenases, the expression of different alcohol dehydrogenases in the above E. coli lines engineered to produce 1,3-butanediol resulted in differential product yields amongst the different alcohol dehydrogenases (FIG. 10).

[0257] Production of 4-hydroxy-2-butanone

[0258] Surprisingly, some combinations of aldehyde and alcohol dehydrogenase also allowed for the production of an additional product, 4-hydroxy-2-butanone (FIG. 11). For example, an E. coli line containing the combination of ALDH7 (GI 187934965, SEQ ID NO: 7) and ADH2 (UniProt G5F136_9ACTN, SEQ ID NO: 18) produced nearly equivalent levels of 1,3-butanediol and 4-hydroxy-2-butanone of around 1.2 g/L. Production titers of 4-hydroxy-2-butanone were very high in this particular combination of aldehyde and alcohol dehydrogenases; E. coli lines containing ALDH7 with alternate ADHs, or ADH2 with alternate ALDHs did not accumulate 4-hydroxy-2-butanone at such high levels.

[0259] Further, in addition to evaluating the different combinations of aldehyde and alcohol dehydrogenases on the production of 4-hydroxy-2-butanone, different pathway variants engineered to contain various combinations of genetic components were also evaluated to determine the impact each variant pathway had on the production of 1,3-butanediol and/or 4-hydroxy-2-butanone (FIG. 12A-FIG. 12C). It was found that the pathway described in FIG. 12A allowed for the production of predominantly 4-hydroxy-2-butanone, the pathway described in FIG. 12B allowed for the production of both 1,3-butanediol and 4-hydroxy-2-butanone, and the pathway described in FIG. 12C allowed for the production of predominantly 1,3-butanediol (FIG. 13). Thus, the product ratio between 1,3-butanediol and 4-hydroxy-2-butanone can be tuned by transforming the E. coli cell line with pathway variants that allow for significant production of 4-hydroxy-2-butanone, 1,3-butanediol, or both of these compounds (FIG. 13).

[0260] Purification of ALDH3

[0261] The aldehyde dehydrogenase ALDH3 (GI 31075383) was also recombinantly expressed and purified for experiments investigating the in vitro kinetic behavior of this protein with various C4 and C2 substrates. FIG. 14 illustrates a size-exclusion chromatogram of GA-ALDH3.

### Conclusion

[0262] Applicants have demonstrated that monofunctional aldehyde/alcohol dehydrogenases can be used for the production of various alcohols in host cells. Overall, this approach of using a combination of monofunctional aldehyde and alcohol dehydrogenases, rather than a single bifunctional enzyme, allows for greater exploration of sequence diversity and substrate specificity found in the monofunctional enzymes while preserving the high efficiency of transformation found in pathways involving bifunctional enzymes.

### Example 2: Analysis of Kinetic Properties of Monofunctional Aldehyde Dehydrogenase ALDH7

[0263] This Example describes the characterization of ALDH7 protein with respect to the in vitro kinetic behavior of this protein with various C4 and C2 substrates. This section also describes directed evolution of this protein to alter its substrate specificity or activity.

[0264] ALDH7 has NCBI GenInfo Identifier Number GI 187934965. This protein was recombinantly expressed and purified as described in Example 1.

[0265] To assess the kinetic behavior of ALDH7 with various substrates, the activity of ALDH7 protein will be measured in vitro by monitoring the oxidation of NADH at 340 nm at 30° C. The assay mixture (400 μL) will contain 100 μM NADH in 100 mM Tris 1 mM DTT pH 7.5. The reaction will be initiated by the addition of substrate. Substrates to be analyzed include acetyl-CoA and butyryl-CoA. Kinetic parameters (k_{cat}, K_{M}) will be determined by fitting the data using Microcal Origin to the equation: vₒ=vₘₐₓ [S]/(K_{M}+[5]), where v is the initial rate and [5] is the substrate concentration. Data will be reported as mean±s.e. (n=3) unless otherwise noted and standard error will be derived from the nonlinear curve fitting. Error in k_{cat}/K_{M} will be calculated by propagation of error from the individual kinetic parameters.

[0266] ALDH7 will also be subjected to directed evolution to alter its substrate specificity or activity. Applicants found that ALDH7 displays activity toward a range of substrates including acetoacetyl-CoA and 3-hydroxybutyryl-CoA. As was seen in Example 1, this broad substrate specificity enabled E. coli lines expressing ALDH7 to produce both 4-hydroxy-2-butanone and 1,3-butanediol respectively. Alteration of the substrate specificity could shift the product profile to only 4-hydroxy-2-butanone, only 1,3-butanediol, or variable mixtures of both compounds.

[0267] Directed evolution of ALDH7 will be pursued via DNA shuffling. SEQ ID NO: 1-16 are between 52% and 97% identical at the nucleic acid level. These sequences will be partially digested with DNaseI and reassembled via PCR to create chimeric fusion sequences containing fragments from multiple parental sequences. These chimeric sequences will be transformed into E. coli lines and screened for 4-hydroxy-2-butanone and 1,3-butanediol production according to the methods described in Example 1. Chimeric sequences displaying desirable properties can be used as parental sequences for additional rounds of DNA shuffling in an iterative fashion.

[0268] Directed evolution of ALDH7 will also be pursued via saturation mutagenesis. A structural homology model of ALDH7 will be built using the I-TASSER protein structure prediction webserver (http://zhanglab.ccmb.med.umich.edu/I-TASSER/) and used to investigate the active site of the protein. Residues surrounding the active site will be subjected to saturation mutagenesis, transformed into E. coli lines, and screened for 4-hydroxy-2-butanone and 1,3-butanediol production. Mutant sequences displaying desirable properties can be used as parental sequences for additional rounds of saturation mutagenesis in an iterative fashion.

### Example 3: Control of Hydroxybutanone and Butanediol Production Through Expression of a Monofunctional Secondary Alcohol Dehydrogenase

[0269] This Example describes how expression of a monofunctional secondary alcohol dehydrogenase can be used to control the production of 4-hydroxy-2-butanone and 1,3-butanediol in a pathway that can produce both of these products.

### Introduction

[0270] In Example 1, it was found that certain combinations of aldehyde and alcohol dehydrogenases in a biochemical pathway containing an acetoacetyl-CoA thiolase/synthase (e.g. phaA) and an acetoacetyl-CoA reductase (e.g. phaB) allowed for the production of both 1,3-butanediol and 4-hydroxy-2-butanone from acetyl-CoA starting material (See e.g. FIG. 12B). This result stemmed from the appearance of an unexpected peak in GC-MS quantification of butanediol production in a pathway modeled off of the pathway presented in FIG. 6C. It was found that 4-hydroxy-2-butanone was being produced as a significant side-product present in some cultures. Hydroxybutanone may be produced by reduction of an earlier pathway intermediate, acetoacetyl-CoA, by an ALDH, followed by subsequent reduction of acetoacetaldehyde by an ADH (See FIG. 12B). It was also described in Example 1 that the product ratio between 1,3-butanediol and 4-hydroxy-2-butanone can be tuned by transforming the E. coli cell line with pathway variants that allow for significant production of 4-hydroxy-2-butanone, 1,3-butanediol, or both of these compounds (FIG. 13).

[0271] As an alternative strategy for altering the ratio of butanediol and hydroxybutanone that would not preclude off-pathway acetoacetaldehyde from conversion to butanediol, Applicant designed a pathway that contained a secondary alcohol dehydrogenase (SADH) such that this pathway would accept acetoacetaldehyde, reduce it to 4-hydroxy-2-butanone, and then further reduce it to 1,3-butanediol (FIG. 15). It was thought that the net product of this pathway would ultimately be butanediol, but some carbon would be channeled through 3-hydroxybutyraldehyde and some carbon would be channeled through acetoacetaldehyde. This Example describes how use of various secondary alcohol dehydrogenases allows for fine-tuning of the production of hydroxybutanone and butanediol.

### Materials and Methods

[0272] Unless otherwise described, applicable materials and methods as described in this Example are analogous to those described in Example 1.

### Results

[0273] To implement the pathway described in FIG. 15, the biochemical literature was thoroughly surveyed to identify secondary alcohol dehydrogenases (SADHs) either reported to reduce 4-hydroxy-2-butanone to 1,3-butanediol or reported to have broad specificity for similar substrates. A substantial number of these enzymes have been reported in bacteria, yeast, and parasitic protozoa. These enzymes are generally classified as zinc or iron-alcohol dehydrogenases and maximum percent identity within the sequences represented here range from 27-76% (Table 5).

TABLE 5
Identification of secondary alcohol dehydrogenases
for reduction of hydroxybutanone to butanediol

| | Gene | | SEQ |
|---|---|---|---|
| Organism | Name | Accession | ID NO. |
| Pichia kudriavzevii | SADH1 | KGK36767.1 | 250 |
| Pyrococcus furiosus | SADH2 | WP_011011186.1 | 251 |
| DSM 3638 | | | |
| Cupriavidus necator | SADH3 | WP_011614641.1 | 252 |
| Thermoanaerobacter | SADH4 | P14941.1 | 253 |
| brockii | | | |
| Clostridium beijerinckii | SADH5 | AAA23199.2 | 254 |
| Kluyveromyces lactis | SADH6 | XP_455102.1 | 255 |
| NRRL Y-1140 | | | |
| Phytomonas sp. ADU-2003 | SADH7 | AAP39869.1 | 256 |
| Ralstonia eutropha H16 | SADH8 | Q0KDL6.1 | 257 |
| Trichomonas vaginalis G3 | SADH9 | XP_001580601.1 | 258 |
| Pseudomonas fluorescens | SADH10 | AJP52792.1 | 259 |
| Lactococcus lactis | SADH11 | WP_011835462.1 | 260 |
| Saccharomyces cerevisiae | SADH12 | AAC04974.1 | 261 |
| Escherichia coli | SADH13 | WP_000374004.1 | 262 |
| Zygoascus ofunaensis | SADH14 | BAD32689.1 | 263 |
| Candida parapsilosis | SADH15-2 | BAA24528.1 | 264 |
| Cyberlindnera jadinii | SADH16 | BAN45671.1 | 265 |
| Rhodococcus ruber | SADH17 | CAD36475.1 | 266 |

[0274] The identified SADHs in Table 5 were cloned into E. coli in pathways with aldh7 and adh2 (which consistently produced an even mixture of butanediol and hydroxybutanone, See FIG. 13), transformed E. coli were cultured, and metabolite production was quantified. It was found that many SADHs shifted the product profile compared to the aldh7-adh2 control. At least four SADHs enabled butanediol production of 2 g/L with hydroxybutanone production limited to 250 mg/L or less (FIG. 16). This pathway design appears preferable to enforcing specificity through an ADH that will not accept acetoacetaldehyde; acetoacetaldehyde need not be a dead end product and can still be channeled to butanediol production.

[0275] Extensive screening of candidate ALDHs, SADHs, and pathway improvements enabled production of pathways that exhibit tight control of the butanediol:hydroxybutanone product profile (FIG. 16 and FIG. 17). Maximum hydroxybutanone production was achieved with a pathway that did not express an acetoacetyl-CoA reductase and thus can only supply acetoacetyl-CoA to aldh7-adh2. An even mixture of products was achieved when an acetoacetyl-CoA reductase was added, thus allowing aldh7-adh2 to reduce both acetoacetyl-CoA and 3-hydroxybutyrl-CoA. Finally, maximum butanediol titer was achieved when the pathway was equipped with sadh1, which yields a two-tier pathway where half of the flux proceeds through 3-hydroxybutyryl-CoA to butanediol and half of the flux proceeds through hydroxybutanone to butanediol. Thus, in addition to use of more selective ALDHs which do not reduce acetoacetyl-CoA, this data demonstrates that 4-hydroxy-2-butanone production can be limited by expression of a secondary alcohol dehydrogenase (SADH) which reduces any accumulated 4-hydroxy-2-butanone to 1,3-butanediol.

### CONCLUSION

[0276] This Example has demonstrated an expansion of butanediol and hydroxybutanone production pathways with the addition of a secondary alcohol dehydrogenase that can reduce 4-hydroxy-2-butanone to 1,3-butanediol. This addition allows for recapturing off-pathway carbon diverted to hydroxybutanone should butanediol be the desired product, as well as producing a finely tuned product profile control should a mixture of products be desired. This mixture of products may be useful for polymer precursor production. The ability to deliver a product profile through balancing expression level of the enzymes expressed in this pathway affords a great deal of control, and opens the door to applications where tunable product profile is desired, such as catalytic upgrading to longer-chain compounds.

1. A recombinant host cell that facilitates the production of an alcohol from an acyl-CoA, wherein the host cell comprises:
a) a first nucleic acid which encodes a polypeptide involved in the stepwise conversion of an acyl-CoA to a substrate for a monofunctional aldehyde dehydrogenase;
b) a second nucleic acid which encodes a monofunctional aldehyde dehydrogenase; and
c) a third nucleic acid which encodes a monofunctional alcohol dehydrogenase;
wherein at least one nucleic acid selected from the group consisting of the first nucleic acid, the second nucleic acid, and the third nucleic acid is a recombinant nucleic acid.

2. The host cell of claim 1, wherein the host cell is E. coli.

3. The host cell of claim 1, wherein at least two nucleic acids selected from the group consisting of the first nucleic acid, the second nucleic acid, and the third nucleic acid are separate nucleic acids.

4. The host cell of claim 1, wherein the recombinant nucleic acid encodes a polypeptide selected from an acetoacetyl-CoA thiolase, a 3-hydroxybutyryl-CoA dehydrogenase, a crotonase, a trans-enoyl-CoA reductase, a monofunctional aldehyde dehydrogenase, a monofunctional alcohol dehydrogenase or any combination thereof.

5. The host cell of claim 4, wherein the acetoacetyl-CoA thiolase has at least 80% amino acid identity to SEQ ID NO: 33, the 3-hydroxybutyryl-CoA dehydrogenase has at least 80% amino acid identity to SEQ ID NO: 34, the crotonase has at least 80% amino acid identity to SEQ ID NO: 36, the trans-enoyl-CoA reductase has at least 80% amino acid identity to SEQ ID NO: 37, or any combination thereof.

6. The host cell of claim 4, wherein the monofunctional aldehyde dehydrogenase has at least 80% amino acid identity to SEQ ID NO: 16, the monofunctional alcohol dehydrogenase has at least 80% amino acid identity to SEQ ID NO: 17, or the monofunctional aldehyde dehydrogenase has at least 80% amino acid identity to SEQ ID NO: 16 and the monofunctional alcohol dehydrogenase has at least 80% amino acid identity to SEQ ID NO: 17.

7. The host cell of claim 1, wherein the acyl-CoA is acetyl-CoA.

8. The host cell of claim 1, wherein the alcohol is selected from n-butanol, crotyl alcohol, 1,3-butanediol, 4-hydroxy-2-butanone, or any combination thereof.

9. The host cell of claim 1, wherein the host cell exhibits reduced activity of one or more polypeptides selected from the group consisting of adhE, ldhA, ack-pta, poxB, and frdBC, or homologs thereof, as compared to a corresponding control cell.

10. The host cell of claim 9, wherein the host cell comprises knockout mutations in adhE, ldhA, ack-pta, poxB, and frdBC, or homologs thereof.

11. The host cell of claim 1, wherein the host cell further comprises a monofunctional secondary alcohol dehydrogenase.

12. The host cell of claim 11, wherein the monofunctional secondary alcohol dehydrogenase has at least 80% amino acid identity to SEQ ID NO: 250.

13. A recombinant host cell for the production of n-butanol, the host cell comprising:
a) a nucleic acid encoding an acetoacetyl-CoA thiolase capable of catalyzing the conversion of acetyl-CoA to acetoacetyl-CoA;
b) a nucleic acid encoding a 3-hydroxybutyryl-CoA dehydrogenase capable of catalyzing the conversion of acetoacetyl-CoA to 3-hydroxybutyryl-CoA;
c) a nucleic acid encoding a crotonase capable of catalyzing the conversion of 3-hydroxybutyryl-CoA to crotonyl-CoA;
d) a nucleic acid encoding a trans-enoyl-CoA reductase capable of catalyzing the conversion of crotonyl-CoA to butyryl-CoA;
e) a nucleic acid encoding a monofunctional aldehyde dehydrogenase capable of catalyzing the conversion of butyryl-CoA to butyraldehyde;
f) a nucleic acid encoding a monofunctional alcohol dehydrogenase capable of catalyzing the conversion of butyraldehyde to n-butanol;
wherein one or more of the nucleic acids are recombinant, and wherein the host cell is capable of producing at least 10-fold more n-butanol than ethanol.

14. A recombinant host cell for the production of crotyl alcohol, the host cell comprising:
a) a nucleic acid encoding an acetoacetyl-CoA thiolase capable of catalyzing the conversion of acetyl-CoA to acetoacetyl-CoA;
b) a nucleic acid encoding a 3-hydroxybutyryl-CoA dehydrogenase capable of catalyzing the conversion of acetoacetyl-CoA to 3-hydroxybutyryl-CoA;
c) a nucleic acid encoding a crotonase capable of catalyzing the conversion of 3-hydroxybutyryl-CoA to crotonyl-CoA;
d) a nucleic acid encoding a monofunctional aldehyde dehydrogenase capable of catalyzing the conversion of crotonyl-CoA to crotonaldehyde;
e) a nucleic acid encoding a monofunctional alcohol dehydrogenase capable of catalyzing the conversion of crotonaldehyde to crotyl alcohol;
wherein one or more of the nucleic acids are recombinant.

15. A recombinant host cell for the production of 1,3-butanediol, the host cell comprising:
a) a nucleic acid encoding an acetoacetyl-CoA thiolase capable of catalyzing the conversion of acetyl-CoA to acetoacetyl-CoA;
b) a nucleic acid encoding a 3-hydroxybutyryl-CoA dehydrogenase capable of catalyzing the conversion of acetoacetyl-CoA to 3-hydroxybutyryl-CoA;
c) a nucleic acid encoding a monofunctional aldehyde dehydrogenase capable of catalyzing the conversion of 3-hydroxybutyryl-CoA to 3-hydroxybutyraldehyde;
d) a nucleic acid encoding a monofunctional alcohol dehydrogenase capable of catalyzing the conversion of 3-hydroxybutyraldehyde to 1,3-butanediol;
wherein one or more of the nucleic acids are recombinant.

16. A recombinant host cell for the production of 4-hydroxy-2-butanone, the host cell comprising:
a) a nucleic acid encoding an acetoacetyl-CoA thiolase capable of catalyzing the conversion of acetyl-CoA to acetoacetyl-CoA;
b) a nucleic acid encoding a monofunctional aldehyde dehydrogenase;
c) a nucleic acid encoding a monofunctional alcohol dehydrogenase;
wherein one or more of the nucleic acids are recombinant.

17. A recombinant host cell for the production of one or more C4 alcohols, the host cell comprising:
a) a nucleic acid encoding an acetoacetyl-CoA thiolase;
b) a nucleic acid encoding a 3-hydroxybutyryl-CoA dehydrogenase;
c) a nucleic acid encoding a crotonase;
d) a nucleic acid encoding a trans-enoyl-CoA reductase;
e) a nucleic acid encoding a monofunctional aldehyde dehydrogenase;
f) a nucleic acid encoding a monofunctional alcohol dehydrogenase;
wherein one or more of the nucleic acids are recombinant,
and wherein the host cell is capable of producing a C4 alcohol at concentrations that are at least 10-fold higher than the concentration of ethanol produced by the host cell.

18. The host cell of claim 17, wherein the C4 alcohol is selected from n-butanol, crotyl alcohol, 1,3-butanediol, 4-hydroxy-2-butanone, or any combination thereof.

19. A method of producing an alcohol from an acyl-CoA, the method comprising:
a) providing the recombinant host cell of claim 1;
b) culturing the recombinant host cell in a culture medium comprising a suitable carbon source such that the host cell produces an alcohol.

20. The method of claim 19, further comprising a step of substantially purifying the alcohol from the culture medium.

21. A method of producing n-butanol, the method comprising:
a) providing the recombinant host cell of claim 13;
b) culturing the recombinant host cell in a culture medium comprising a suitable carbon source such that the host cell produces n-butanol,
wherein the host cell produces at least 10-fold more n-butanol than ethanol.

22. The method of claim 21, further comprising a step of substantially purifying n-butanol from the culture medium.

23. A method of producing crotyl alcohol, the method comprising:
a) providing the recombinant host cell of claim 14;
b) culturing the recombinant host cell in a culture medium comprising a suitable carbon source such that the host cell produces crotyl alcohol.

24. The method of claim 23, further comprising a step of substantially purifying crotyl alcohol from the culture medium.

25. A method of producing 1,3-butanediol, the method comprising:
a) providing the recombinant host cell of claim 15;
b) culturing the recombinant host cell in a culture medium comprising a suitable carbon source such that the host cell produces 1,3-butanediol.

26. The method of claim 25, further comprising a step of substantially purifying 1,3-butanediol from the culture medium.

27. A method of producing 4-hydroxy-2-butanone, the method comprising:
a) providing the recombinant host cell of claim 16;
b) culturing the recombinant host cell in a culture medium comprising a suitable carbon source such that the host cell produces 4-hydroxy-2-butanone.

28. The method of claim 27, further comprising a step of substantially purifying 4-hydroxy-2-butanone from the culture medium.

29. A method of producing one or more C4 alcohols, the method comprising:
a) providing the recombinant host cell of claim 17;
b) culturing the recombinant host cell in a culture medium comprising a suitable carbon source such that the host cell produces a C4 alcohol,
wherein the host cell produces the C4 alcohol at concentrations that are at least 10-fold higher than the concentration of ethanol produced by the host cell.

30. The method of claim 29, further comprising a step of substantially purifying a C4 alcohol from the culture medium.

31. The method of claim 29, wherein the C4 alcohol is selected from the group consisting of n-butanol, crotyl alcohol, 1,3-butanediol, and 4-hydroxy-2-butanone.

32. A recombinant polypeptide comprising an amino acid sequence selected from the group consisting of SEQ ID NO: 60, SEQ ID NO: 61, SEQ ID NO: 62, SEQ ID NO: 63, SEQ ID NO: 64, SEQ ID NO: 65, SEQ ID NO: 66, SEQ ID NO: 67, SEQ ID NO: 68, SEQ ID NO: 69, SEQ ID NO: 70, SEQ ID NO: 71, SEQ ID NO: 72, SEQ ID NO: 73, SEQ ID NO: 74, SEQ ID NO: 75, SEQ ID NO: 76, SEQ ID NO: 77, SEQ ID NO: 78, SEQ ID NO: 79, SEQ ID NO: 80, SEQ ID NO: 81, SEQ ID NO: 82, SEQ ID NO: 83, SEQ ID NO: 84, SEQ ID NO: 85, SEQ ID NO: 86, SEQ ID NO: 87, SEQ ID NO: 88, SEQ ID NO: 89, SEQ ID NO: 90, SEQ ID NO: 91, SEQ ID NO: 92, SEQ ID NO: 93, SEQ ID NO: 94, SEQ ID NO: 95, SEQ ID NO: 96, SEQ ID NO: 97, SEQ ID NO: 98, SEQ ID NO: 99, SEQ ID NO: 100, SEQ ID NO: 101, SEQ ID NO: 102, SEQ ID NO: 103, SEQ ID NO: 104, SEQ ID NO: 105, SEQ ID NO: 106, SEQ ID NO: 107, SEQ ID NO: 108, SEQ ID NO: 109, SEQ ID NO: 110, SEQ ID NO: 111, SEQ ID NO: 112, SEQ ID NO: 113, SEQ ID NO: 114, SEQ ID NO: 115, SEQ ID NO: 116, SEQ ID NO: 117, SEQ ID NO: 118, SEQ ID NO: 119, SEQ ID NO: 120, SEQ ID NO: 121, SEQ ID NO: 122, SEQ ID NO: 123, SEQ ID NO: 124, SEQ ID NO: 125, SEQ ID NO: 126, SEQ ID NO: 127, SEQ ID NO: 128, SEQ ID NO: 129, SEQ ID NO: 130, SEQ ID NO: 131, SEQ ID NO: 132, SEQ ID NO: 133, SEQ ID NO: 134, SEQ ID NO: 135, SEQ ID NO: 136, SEQ ID NO: 137, SEQ ID NO: 138, SEQ ID NO: 139, SEQ ID NO: 140, SEQ ID NO: 141, SEQ ID NO: 142, SEQ ID NO: 143, SEQ ID NO: 144, SEQ ID NO: 145, SEQ ID NO: 146, SEQ ID NO: 147, SEQ ID NO: 148, SEQ ID NO: 149, SEQ ID NO: 150, SEQ ID NO: 151, SEQ ID NO: 152, SEQ ID NO: 153, and SEQ ID NO: 154.

33. A recombinant nucleic acid comprising a nucleotide sequence selected from the group consisting of SEQ ID NO: 155, SEQ ID NO: 156, SEQ ID NO: 157, SEQ ID NO: 158, SEQ ID NO: 159, SEQ ID NO: 160, SEQ ID NO: 161, SEQ ID NO: 162, SEQ ID NO: 163, SEQ ID NO: 164, SEQ ID NO: 165, SEQ ID NO: 166, SEQ ID NO: 167, SEQ ID NO: 168, SEQ ID NO: 169, SEQ ID NO: 170, SEQ ID NO: 171, SEQ ID NO: 172, SEQ ID NO: 173, SEQ ID NO: 174, SEQ ID NO: 175, SEQ ID NO: 176, SEQ ID NO: 177, SEQ ID NO: 178, SEQ ID NO: 179, SEQ ID NO: 180, SEQ ID NO: 181, SEQ ID NO: 182, SEQ ID NO: 183, SEQ ID NO: 184, SEQ ID NO: 185, SEQ ID NO: 186, SEQ ID NO: 187, SEQ ID NO: 188, SEQ ID NO: 189, SEQ ID NO: 190, SEQ ID NO: 191, SEQ ID NO: 192, SEQ ID NO: 193, SEQ ID NO: 194, SEQ ID NO: 195, SEQ ID NO: 196, SEQ ID NO: 197, SEQ ID NO: 198, SEQ ID NO: 199, SEQ ID NO: 200, SEQ ID NO: 201, SEQ ID NO: 202, SEQ ID NO: 203, SEQ ID NO: 204, SEQ ID NO: 205, SEQ ID NO: 206, SEQ ID NO: 207, SEQ ID NO: 208, SEQ ID NO: 209, SEQ ID NO: 210, SEQ ID NO: 211, SEQ ID NO: 212, SEQ ID NO: 213, SEQ ID NO: 214, SEQ ID NO: 215, SEQ ID NO: 216, SEQ ID NO: 217, SEQ ID NO: 218, SEQ ID NO: 219, SEQ ID NO: 220, SEQ ID NO: 221, SEQ ID NO: 222, SEQ ID NO: 223, SEQ ID NO: 224, SEQ ID NO: 225, SEQ ID NO: 226, SEQ ID NO: 227, SEQ ID NO: 228, SEQ ID NO: 229, SEQ ID NO: 230, SEQ ID NO: 231, SEQ ID NO: 232, SEQ ID NO: 233, SEQ ID NO: 234, SEQ ID NO: 235, SEQ ID NO: 236, SEQ ID NO: 237, SEQ ID NO: 238, SEQ ID NO: 239, SEQ ID NO: 240, SEQ ID NO: 241, SEQ ID NO: 242, SEQ ID NO: 243, SEQ ID NO: 244, SEQ ID NO: 245, SEQ ID NO: 246, SEQ ID NO: 247, SEQ ID NO: 248, and SEQ ID NO: 249.

34. A recombinant host cell comprising the recombinant polypeptide of claim 32.

35. An expression vector comprising a recombinant nucleic acid of claim 33.

36. A recombinant host cell comprising the recombinant nucleic acid of claim 33.

The application's sequence listing, which the Patent Office published only in electronic form, follows.

SEQUENCE LISTING (301 sequences)

SEQ ID NO: 1 - protein, 468 aa, Clostridium beijerinckii
MNKDTLIPTTKDLKLKTNVENINLKNYKDNSSCFGVFENVENAINSAVHAQKILSLHYTKEQREKIITEIRKAALENKEVLATMILEETHMGRYEDKILKHELVAKYTPGTEDLTTTAWSGDNGLTVVEMSPYGVIGAITPSTNPTETVICNSIGMIAAGNAVVFNGHPGAKKCVAFAIEMINKAIISCGGPENLVTTIKNPTMESLDAIIKHPLIKLLCGTGGPGMVKTLLNSGKKAIGAGAGNPPVIVDDTADIEKAGKSIIEGCSFDNNLPCIAEKEVFVFENVADDLISNMLKNNAVIINEDQVSKLIDLVLQKNNETQEYFINKKWVGKDAKLFSDEIDVESPSNIKCIVCEVNANHPFVMTELMMPILPIVRVKDIDEAVKYTKIAEQNRKHSAYIYSKNIDNLNRFEREIDTTIFVKNAKSFAGVGYEAEGFTTFTIAGSTGEGITSARNFTRQRRCVLAG

SEQ ID NO: 2 - protein, 505 aa, Escherichia coli
MNDIEIAQAVSTILSKFTKATPDEAPATSEAARVDGLDEIVAKALAQHSSVRDASAISQVAKVANASTGAFDTMDEAISAAVLAQVQYRHCSMQDRASFINGIRDVFLQEDVLCALSRMAVEETGMGNYEDKLIKNRVAALKTPGIEDLTTSAVSGDGGLTLIEYSAFGVIGSITPTTNPTETIINNSIGMLAAGNTVVFSPHPRSRKVSLYAVELINNKLAQLGAPANMVVTVTKPSIDNTNVLINDPRINMLVATGGPAIVKTVMSSGKKAIGAGAGNPPAVVDETADIEKAARDIIKGCSFDNNLPCVAEKEVIVVNQVADYLIHCMKKSGAYLLCDKKLSQQLQSLVLNEKGTGPNTAFVGKDARYILQQLGIQVGDDIKVILIEAEKTHPFVVHELMMPVLPVVRVDNVDEAIELAVKVEHGNRHTAVMHSTNVEKLTKMARLIQTTIFVKNGPSYAGLGVGGEGHATFTIAGPTGEGLTSARSFARRRRCVMVEALNIR

SEQ ID NO: 3 - protein, 468 aa, Clostridium saccharoperbutylacetonicum
MIKDTLVSITKDLKLKTNVENANLKNYKDDSSCFGVFENVENAISNAVHAQKILSLHYTKEQREKIITEIRKAALENKEILATMILEETHMGRYEDKILKHELVAKYTPGTEDLTTTAWSGDNGLTVVEMSPYGVIGAITPSTNPTETVICNSIGMIAAGNTVVFNGHPGAKKCVAFAVEMINKAIISCGGPENLVTTIKNPTMDSLDAIIKHPSIKLLCGTGGPGMVKTLLNSGKKAIGAGAGNPPVIVDDTADIEKAGKSIIEGCSFDNNLPCIAEKEVFVFENVADDLISNMLKNNAVIINEDQVSKLIDLVLQKNNETQEYSINKKWVGKDAKLFLDEIDVESPSSVKCIICEVSARHPFVMTELMMPILPIVRVKDIDEAIEYAKIAEQNRKHSAYIYSKNIDNLNRFEREIDTTIFVKNAKSFAGVGYEAEGFTTFTIAGSTGEGITSARNFTRQRRCVLAG

SEQ ID NO: 4 - protein, 458 aa, Vibrio shilonii
MSFDINNAQGVFETVEAAIEATHKAQVEFYANSTKEGREAILTAIRGAVLAKAEDFAKMVREETKLGRVEDKIAKHQLTAAKTPGTEVLETKVWSGDNGISLEERAPYGVIGAVTPVTNPTETIVNNAISMLASGNAVTFNVHPSSKVVSAVMIDMINKTIVAAGGPANLVTMVKEPTLETLNEIAKSPLVNMLVGTGGPGLVKAILQSGKKGVGAGAGNPPVIVDASANLDLAAAGVYGGASFDNNLLCIGEKEVFVEDSVADEFLAKLEATGAYVLSAEEAEKLTAQILTMDEIDGAKPCTAQEIARVWHPVKQHVGQDAGEILKSIGVESETRLAVMVVENDHPLVHVEQMMPVLPVVRCANIDEAIERAVAAERGNKHSACIYSGNIENVTKFGRAINTTIFAHNGPTLSGVGYNAEGTSTFTIAGPTGEGITNAYSFTRARRFAIAQGGLRIV

SEQ ID NO: 5 - protein, 462 aa, Ruminococcus gnavus
MSVNEKMVQDIVQEVVAKMQISSDVSGKKGVFSDMNEAIEASKKAQKIVAKMSMDQREAIISKIREKIKENAEILARMGVEETGMGNVGHKILKHQLVAEKTPGTEDITTTAWSGDRGLTLIEMGPFGVIGAITPCTNPSETVLCNTIGMLAGGNTVVFNPHPAAIKTSIYAVNLLNEASVEVGGPENIAVTVEHPTMETSDIMMKHKDIHLIAATGGPGVVTAVLSSGKRGIGAGAGNPPALVDETADIRKAAEDIVNGCTFDNNLPCIAEKEIVAVDSIADELLHYMVSEQGCYMISKEEQDALTEVVLKGGRLNRKCVGRDAKTLLGMIGITVPDNIRCITFEGPKEHPLIAEELMMPILGVVRAKDFDDAVEQAVWLEHGNRHSAHIHSKNVDNITKYAKAIDTAILVKNGPSYAALGFGGEGYCTFTIASRTGEGLTSASTFTKRRRCVMTDSLCIR

SEQ ID NO: 6 - protein, 478 aa, Clostridium bolteae
MKEGVIRLDMDIKVIEQLVEQALKEIKAEQPLKFTAPKLERYGVFKTMDEAIAASEEAQKKLLFSKISDRQKYVDVIRSTIIKRENLELISRLSVEETEIGDYEHKLIKNRLAAEKTPGTEDLLTEAITGDNGLTLVEYCPFGVIGAITPTTNPTETIINNSISMIAGGNTVVFSPHPRAKKVSQMTVKMLNKALIDNGAPPNLITMVEEPSIENTNKMIDNPSVRLLVATGGPSIVKKVLSSGKKAIGAGAGNPPVVVDETADIDKAAKDIVDGCSFDNNVPCIAEKEVFAVDSICDYLIHHMKENGAYQITDPMLLEQLVALVTTEKGGPKTSFVGKSARYILDKLGITVDASVRVIIMEVPKDHLLVQEEMMMPILPVVRVSDVDTAIEYAHQAEHGNRHTAMMHSKNVEKLSKMAKIMETTIFVKNAPSYAGIGVGGEGYTTFTIAGPTGEGLTSPRTFCRKRKCVMTDAFSIR

SEQ ID NO: 7 - protein, 467 aa, Clostridium botulinum
MERNLSVLSQTNDLKITKRTEGDKSNNKESYLGVFKKVENAITKAIYAQKKLSLYYTKEDRERIIKSIRKATLENKEILAKMIVDETHMGRYEDKILKHELVAKYTPGTEDLITTAWSGDQGLTLVEMSPYGVIGAITPSTNPTETVICNSIGMIAAGDSVVFNGHPGAKKCVAFAVDMINKAVIREGGPENLVTTVENPTMESLNVIMKHPYIKLLCGTGGPGLIKTLLNSGKKAIGAGAGNPPVIVDDSADIDKAAKNIIEGCSFDNNLPCIAEKEVFVFENVANDLIQNMIKNNAVLINENQVSKLLDLVLLERKDETLEYAINKKWVGKDAKLFLDKIGIKASDNVRCIICEVDANHPFVMTELMMPILPIVRVKDVDEAIECAKTAEQRKRHSAYMYSKNIDNLNRFEKEIDTTIFVKNAKSFAGVGFGAEGFTTFTIAGPTGEGITSARNFTRQRRCVLAG

SEQ ID NO: 8 - protein, 469 aa, Clostridium saccharobutylicum
MNNNLFVSPETKDLKLRTNVENLKFKGCEGGSTYIGVFENAETAIDEAVNAQKRLSLYYTKEQREKIITEIRKVTLKNKEILAQMILEETHMGRYEDKILKHELVAKYTPGTEDLATTAWSGDNGLTVVEMSPYGVIGAITPSTNPTETIICNSIGMIASGNAVVFNGHPGAKKCVAFAVDMINRAIISCGGPRNLVTAIKNPTMESLDAIIKHPAIKLLCGTGGPGMVKTLLSSGKKSIGAGAGNPPVIVDDTADIEKAGKSIIEGCSFDNNLPCIAEKEVFVFENVADDLIKNMLKNNAVIINKDQVSRLVNLVLQKNNETSEYTINKKWVGKDAKLFLDEIDVESSSDVRCIICEVDADHPFVMTELMMPILPIVRVKDIDEAIKYAKIAEQNRKHSAYIYSKNIENLNRFEKEIDTTIFVKNAKSFAGVGYGAEGFTTFTIAGCTGEGITSARNFTRQRRCVFVG

SEQ ID NO: 9 - protein, 497 aa, Clostridium botulinum
MNDFNMIDIESIVKNIVKELTGNEKGQGAITTATAPKEANPLVDIEKKIMGFMNTPTMPVGEYGVFEDINDAIEQAWLAEQEYRKVGLDKRTEIIEAFKAEVRKNVEEISRRTFEETGMGRYEDKILKNNLALDKTPGVEDLEAGVKTGDGGLTLYEMSPFGVIGAIAPSTNPTETIINNGISMLAGGNTVVFSPHPGAKDVSVFIVQLINKAIERINGPKNLIVTVKNPNIESTNIMLAHPKVNMICATGGPGIVKVALSSGKKAIGAGAGNPPVVVDETADIEKAAVDIIDGCSFDNNLPCICEKEVIVVDKVADYLKTCMSKYCALEITDKNMLAQLEKLVLTENGTINKQFVGKNADYIMSKLGVNIDPSIRVIFAEVEANHPFAVEELMMPILPVIRVRNVDEAIDLGVELEHGNRHTAIMHSKHIDNLSKFAKAVQTTIFVKNAPSYAGIGYGAEGHGTFTIAGPTGEGLTSARTFTRKRRCVMVDNFSIK

SEQ ID NO: 10 - protein, 469 aa, Clostridium carboxidivorans
MELESNELSVIIEKVLKEMNKKEFGKKESDGIFDTMDEAVEASYEAQKKYSSYSLEQREKLIQAMRKAIMDNAMEVANLCVKESGMGRVDHKYLKLKLIVEKTQGTEILRPEVYTGDNGLTLIEHGAFGVIGAITPSTNPAATVACNSICMLAGGNTVVFSPHPGALNSCLTMIRILNKAIKEAGGPENLITSVKAPSIENTNIMINHKRIRLVVATGGPGIVKLVLSSGKKAIGAGAGNPPVVVDETADIPKAARDIIAGCSFDNNLPCIAEKEAIVVESVYEELIKEFKKNRVVYELTDEEAEKLVGKVLNYDEKNKKYSINKKFVGKDAKYLLESIGKDAGTGVECLIYRAENSHPFVQEELMMPILPIVKVKNVDEAIETAVEDEHGNRHTAMMHSKNVVNLTKMARAIDTTIFVKNAPSYAGIGFGGEGHTTFTIAGPTGEGITNAVTFTRQRRCTMVDSFRIV

SEQ ID NO: 11 - protein, 473 aa, Clostridium saccharolyticum
MEIGAKEIELIVREVLAGIESRGPKLSYIPAQSDNGVFERVEDAIGAAHTAQREWVEHYRVEDRRRIIEAIRMTAKSHAKTLAKLVWEETGMGRFEDKIQKHMAVIEKTPGVECLTTDAISGDEGLMIEEYAPFGVIGAITPSTNPTETIINNTISMIAGGNAVVFNVHPGAKKCCAHCLKLLHQAIVENGGPANLITMQKEPTMEAVTKMTSDPRIRLMVGTGGMPMVNALLRSGKKTIGAGAGNPPVIVDDSADVSLAAREIYRGASFDNNILCLAEKEVFVMEKAADELVNNLVKEGAYLLNPMELNEILKFAMIEKNGSCEVNKKWVGKDAGLFLEAIGVSGHKDVRLLICETDRNHPFVMVEQLMPILPIVRLRTFEECVESAVAAESGNRHTASMFSRNVENMTRFGKVIETTIFTKNGSTLKGVGIGGEGHTTMTIAGPTGEGLTCARSFTRRRRCMLAEGGLRII

SEQ ID NO: 12 - protein, 463 aa, Unknown
  Geobacillus sp. Y4.1MC1
MDAQKIEKLVRKILEEMEEKKKPAETECEWGIFDHMNQAIEAAEIAQKELVQLSLGQRGKLIEAIRKAAKENAEKFARMAVDETGMGKYEDKIVKNLLAAEKTPGIEDLRTEVFSGDDGLTLVELSPYGVIGAITPTTNPTETIICNSIGMIAAGNAVVFSPHPRAKNTSLYAIKIFNQAIVEAGGPKNLITTVANPSIEQAEIMMKHKTIKMLVATGGPGVVKAVLSSGKKAIGAGAGNPPVVVDETADIEKAAKDIIAGCSFDNNLPCVAEKEVIAVESIADRLIDYMKKHGAYEITNKEQIQQLTDLVVENGHANKEFVGKDAAYILKHIGINVPPDTRVAIMEVDGKHPLVTVELMMPILPIVRVKNVDQAIELAVEVEHGFRHTAIMHSKNVDHLTKFAKAIQTTIFVKNAPSYAGIGVGGEGYATFTIAGPTGEGLTSAKDFARKRKCVLVDALSIR

SEQ ID NO: 13 - protein, 468 aa, Unknown
  Clostridium sp. DL-VIII
MNKDTTISETENLKFKTNIKNADLKNYENSTSYSGVFEDVEVAINKAITAQKEFSLYYTKEQREKILTEIRKATLKNKKILAKMILDETHMGRYEDKILKHELVAKYTPGIEDLTTTAWSGDNGLTVVEMAPYGVIGAITPSTNPTETVICNSIGMIAAGNAVVFNGHPSAKKCVAFAVDMINKAIVSCGGPKNLITAVKNPTMESLDAIIKHPEIKLLCGTGGPGMVKTLLNSGKKAIGAGAGNPPVIVDDTADIEKAGKNIIEGCSFDNNLPCIAEKEVFVFDNVADNLIDNMLKNNAVIINKDKITKLLNLILQKNNETQEYNINKKWVGKDAKLFLNEIDVEAPSSVRCIICEVEPDHPFVMTELMMPILPIVRVKNIDDAIQYAKIAEQSRKHSAYIYSKNIDNLNRFEKEIDTTIFVKNAKSFAGVGYNAEGFTTFTIAGCTGEGITSARNFTRQRRCVLAG

SEQ ID NO: 14 - protein, 465 aa, Unknown
  Fusobacterium nucleatum subsp. animalis F0419
MEFEVNNIEEIVELIMKKMAESNISTAGNSKNGVFDNVDEAIEEAKKAQAILFSSKLELREKIIASIRDTLKNHVTELAELAVKETGMGRVADKELKNKIAIEKTPGLEDLKAFAFSGDDGLTVMELSPYGVIGAITPSTNPSETVICNSIGMIAAGNAVIFAPHPGAKRTSIRTVELINEAIRKVGGPDNLVVTIREPSIENTEKIIANPNIKMLVATGGPGVVKTVMSSGKKAIGAGAGNPPVLVDETADIEKAAKDIIAGCSFDNNLPCTAEKEVVAVDSIVNYLIFEMQKNGAYLLKDKELIEKLLSLVLKNNSPDRKYVGRDAKYLLKQIGIEVGDEIKVIIVETDKNHPFAVEELLMPILPIVKVKDALEGIKVAKELERGLRHTAVIHSKNIDILTKYAREMETTILVKNGPSYAGIGIGGEGHVTFTIAGPTGEGLTSAKSFARNRRCVLVGGFSIK

SEQ ID NO: 15 - protein, 469 aa, Unknown
  Fusobacterium sp. 12_1B
MNLEANNMDEIVALIMKELKKTDIKAGCQSCESLKNGVFSSMDEAIAAAKKAQEILFSSRLEMREKIVASIREVMKDYVVELAELGVKETGMGRAADKALKHQVTIEKTPGVEDLRAFAFSGDDGLTVMELSPYGVIGAITPSTNPSETIICNSIGMISAGNSVVFAPHPGAKRTSIKTVEIINEAVRRAGGPENLVVTIAEPSIENTNRMMENPDIKMLVATGGPGVVKSVMSSGKKAIGAGAGNPPVLVDETADIEKAARDIVAGCSFDNNLPCIAEKEVVAVDSITDYLIFEMQKNGAYLIKDKSVIDRLVAMVLKNGSPNRAYVGKDASYILKDLGINVGDEIRVIITETDKDHPFAVEELLMPILPIIRVKNALEGIEVSKKLEHGLRHTAMIHSKNIDILTKYARDMETTILVKNGPSFAGIGVGGEGHTTFTIAGPTGEGLTSAKSFARNRRCVLVGGLSIK

SEQ ID NO: 16 - protein, 468 aa, Clostridium beijerinckii
MNKDTLIPTTKDLKVKTNGENINLKNYKDNSSCFGVFENVENAISSAVHAQKILSLHYTKEQREKIITEIRKAALQNKEVLATMILEETHMGRYEDKILKHELVAKYTPGTEDLTTTAWSGDNGLTVVEMSPYGVIGAITPSTNPTETVICNSIGMIAAGNAVVFNGHPCAKKCVAFAVEMINKAIISCGGPENLVTTIKNPTMESLDAIIKHPSIKLLCGTGGPGMVKTLLNSGKKAIGAGAGNPPVIVDDTADIEKAGRSIIEGCSFDNNLPCIAEKEVFVFENVADDLISNMLKNNAVIINEDQVSKLIDLVLQKNNETQEYFINKKWVGKDAKLFLDEIDVESPSNVKCIICEVNANHPFVMTELMMPILPIVRVKDIDEAIKYAKIAEQNRKHSAYIYSKNIDNLNRFEREIDTTIFVKNAKSFAGVGYEAEGFTTFTIAGSTGEGITSARNFTRQRRCVLAG

SEQ ID NO: 17 - protein, 381 aa, Unknown
  Campylobacter fetus subsp. fetus strain 82-40
MVNFSYCNPTRIEFGKGKENSIGEYLNEYGAKNVLILFGSDRVKKDGLFDKATASLTKFGIKFSELGDIVSNPVLSKVYEAINLARKNGVDSVLAIGGGSVLDTAKSVAAGAKYDGDVWDLFLAKAPIKDALMVFDIMTLAATGSEMNSFAVVTNEDTKEKISITSSLVNPKVSVINPELMKSISKNYLVYSAADIIAHSIEGYLTATHHPEIISKLVEANISTIIKTTEILLADPDNYDARAEFAWAATCALNGTTYVGVGGYSYPNHMIEHSISALYGVPHGAGLSVVMPAWMKWYKDKNEAQFSRFAKVIFGKNSADEGIEALKTWFKKIGTPTKLRDFGLDMSVSDITTAALHHAKAFGIADIYTKDVLEEILNLAY

SEQ ID NO: 18 - protein, 396 aa, Unknown
  Olsenella sp. oral taxon 809 str. F0356
MINFDYCVPTKVVFGHGVESNVGKYVKEFGGTKAMIHWGGDYVRDTGLLDRVEKSLSAEGIGYVEFEGVVPNPRLSTAKEGLALAKREGVDFLLAIGGGSAIDSSKTIAYGLANDFELEDLFLGKVSTDRIAGLGAISTLAGTGSETSNSTVINIDTMGDVELKRSYNHECARPKFAIMDPELTYTVPAWQTAAAGCDIMMHTMERFFTTVSHTELIDQMSLGLLRAVKTAIPLALAEPDDYDARATLLWAGSLSHNGLTGTGQQGDFASHAIEHEMGALYNCTHGAGLCAMWSSWARYVIDVRPERFAQFGVEVFGVVNDYSDPKGTGLRGIEAWEKFCKSVGMPVRMSELAINPTDEEIRHMAQGAIDARGGDHCGSFMELRVDDVVKILEMAR

SEQ ID NO: 19 - protein, 395 aa, Anaerofustis stercorihominis
MQKFDYYTPTKVIFGKGTENKVGKEMKKDGAKKAYIVYGGKSAKKSGLLDKVEKSLKDENIEYKMIGGVKPNPRLSLAREGVKEAKEFGADFILAVGGGSVIDTAKGIAHGVANPDTDIWDFWEGKAKVEKSLPVGVILTISAAGSEMSNSAVLTNEETGMKRGLSTDFNRPKFAIMDPELTYTLPDYQVGCGVVDIMMHTMDRYFTDLTDCQNDLTDEIAESLLRIVIKNGRVACKNKEDYHAMSEIMWAGSLSHNGLTGLGAPMDFATHRLGHSLSAKFDVAHGASLSAMWPHWANYVKHKDIERFARYARNVWGITEGTDEELADKGIEATVEFFKSINMPTCFSELGIGIQDEDGLRELTNRCFYVKGTKVGKLIPLTEEDIYPIYVSANK

SEQ ID NO: 20 - protein, 390 aa, Bacillus subtilis
MENFTYYNPTKLIFGKGQLEQLRKEFKRYGKNVLLVYGGGSIKRNGLYDQVTGILKEEGAVVHELSGVEPNPRLATVEKGIGLCREHDIDFLLAVGGGSVIDCTKAIAAGVKYDGDAWDIFSKKVTAEDALPFGTVLTLAATGSEMNPDSVITNWETNEKFVWGSNVTHPRFSILDPENTFTVPENQTVYGMVDMMSHVFEQYFHNVENTPLQDRMCFAVLQTVIETAPKLLEDLENYELRETILYAGTIALNGTLQMGYFGDWASHTMEHAVSAVYDIPHAGGLAILFPNWMRYTLDTNVGRFKNLMLNMFDIDTEGKTDKEIALEGIDKLSAFWTSLGAPSRLADYNIGEEKLELIADIAAKEMEHGGFGNFQKLNKDDVLAILRASL

SEQ ID NO: 21 - protein, 386 aa, Faecalibacterium prausnitzii
MNNFLFENKTKVYFGKGGVKEYLGCLLEHYGDTVMLAYGGGSIKHNGVYDEIVGILNAEGKRIVEFPGIMPNPTYAKVQEGAKLARENHVDLILAVGGGSVSDCCKVVSAQAKVDEDLWELENTKHTRPTAFIPLGTIVTVFGTGSEMNNGAVITHEEKKIKGALWGAQADFAFLDPTYTLSVPMKQVISGAFDTLSHAMETYFGKPDENNLSDDINEAVMRSVIRNIRVLLTDKDNYEARSELTWASAMAENGILKIGKVTDFQCHMIEHQLGAYTNCNHGAGLAVIHPVLYRHLLPANTARFARFAQNVWGIDPAGKSELKLAQAGVEALAAFIKEIGMPTTFAELGVPADTDLKAVADSTVLTGGCCKKLSREELLDILNECK

SEQ ID NO: 22 - protein, 388 aa, Erysipelotrichaceae bacterium
MRNFTYHNPVRILFGDHALDQLPDLFREFHVSNLLLVYSGDFIKELGIWDAVYNACAENGIAFYEEGGVVPNPKIELVRELVALGKKKKIDFILAVGGGSSIDTAKAVAAGIPYAHDVWDFFEYTAVPETAVPIGVITTIPASGSECSNCSIISNGLHKCGIEYDCIIPQFAIMNPEYTRTLPAYQTSAGIADILSHMLERYFTNTTHVDTTDYMLEGTMQALMVNARRLMKQPDDIHARAEVQCLAFLAHNNLLDIGRESDWGPHRIEHELSAQYGITHGEGMAVVTIAWARYMAAHHPDKLAQLASRIFGADPFVHSKEDMALLLADHLEEFFKSLHLKTTLHEMGIDDTHFEEMANRATNNGKDCVGHYVALNKQIFIDILHMAL

SEQ ID NO: 23 - protein, 386 aa, Olsenella uli
MYDFMFHVPTKIYFGRGQISHLAELSDFGQKALLVYGGGSIKRNGIYDEAIRILTHAGIEVVELSGVEPNPRIETVRRGVGLCAREGVDMVLAIGGGSTIDCAKVVAAGARYDGDPWDLVLDGSKAASALPIFSVLTLSATGSEMDAFAVISDMSKNEKWGTGAECMKPTMSVLDPSYTFSVSPKQTAAGTADMMSHTFESYFSMDEGAYVQKRLAEGLLGTMIHFGPIALAHPDDYDARANLMWAASHAINGLVSDGCSPAWCVHPMEHELSAFYDITHGEGLAILTPAWMEHVLDAQTAPLFAAYGCNVWGLSGVDDMKVAREAISRTRAFFVEAMHLPATLREVGITDEKNFEVMARKAADGCKGSFVALSQDDIVEIYRAAL

SEQ ID NO: 24 - protein, 394 aa, Streptococcus gallolyticus
MNDFQFQNTTKVYFGKHQLQHLHQEVLKYGQKVLIADGGEFIRQSPLYAQVLKELTDNGIQIFELGSVEPNPRHTTVNREVKLCKGNNIQTVLAVGGGSTIDCCKAIAATSCTDEDDVWTLIEKREPINQALAVIAMPTIASTGSEMDKSCVIANEELHLKKGLNGEAIRPKAAFLNPENTFTVPARQTACGGFDIMMHLLDMNYFVDSDKYPLQFNVVETLLRTIREQLPIALREPENYEARATLLWGASWALNSFCTSGFKTAPSNHGLEQFSAFYDQTHGLGLALVVTKWMTYLLEKDPTVAPDFARLGTNVLGCQPVDDVIEGAKNAIKAFDAFIVNDLGLPRTMTEIGLNDSKLSEMAHAAVTGYGDGTLKGYRELTEANCLAIYKMCL

SEQ ID NO: 25 - protein, 388 aa, Desulfurispirillum indicum
MQNFVFHNPTRIVFGRDKTASIGKATLPYGRRVLLLTGQGSVVKHGILAKVTSSLSTAGISWVECSGVQPNPVLGFVRQAIDTFRRENLDAIVAVGGGSVIDTAKAVAAGVRYEGDVWDFFTGKANVLDAAPITVVLTLPAAASEMNSGGVITNEQTRQKFNLGGEPLSPKVSILDPVNSFSAPVNHSLYGVVDAMVHLLEGYFNGSDPWTPLQDRYAEGIIRTLMECAAIIREQPDHYDARANIMWGATLAFNGLAPCGIGPAGFPMHMIEHSLSALYDVSHGAGLAMILPGWLKYHSDSSPRKVNQFGRRIFELDHQDDRQGAQAAIAELERWLRSMDIPASLHEGGIPIDEIPAIAENAVMLAQKWGLKAYTQAVIEDVLRRASR

SEQ ID NO: 26 - protein, 389 aa, Clostridium spiroforme
MLGDFTYSNPTKIYFGENSLDNLSTELKNYGKNVLLVYGGGSIKKNGIYDKVIDILKKCDKTIIEDAGVMPNPTVEKLYEGCKLAREGNVDLILAVGGGSVCDYAKAVSVSTYCNEDPWEKYYLRMEDVDNKIIPVGCILTMVGTGSEMNGGSVITNHEQKLKIGHVFGDNVFPKFSILNPTFTYTLPKYQMIAGFYDIMSHILEQYFSGEDDNTSDYIMEGLLKSLIHSSKIAVNDPTNYEARSNIMWIATWALNTLVAKGKTTDWMVHMIGQSIGAYTDATHGMTLAAVSIPYYKYICPYGLNKFKRYAINVWDVLSEGKTDEQIANEGLECMEKYMRDLGLVMNISDLGVKEEMLEGIAEGTFIMNGGYKVLTKDEIITILKQSMK

SEQ ID NO: 27 - protein, 397 aa, Tetragenococcus halophilus
MENFDFHVTTDIRFGKDRLGELPQVLNNFGKNVLLVYGGGSIKRNGLYDKLYELFNQNDNNVVELAGVDPNPRIETVQKGVQLCKEHAIDVVLPVGGGSVIDCSKAVAACVFVSGDLWENFVLQKNYKGPALPIVTILTLAATGSEMNGTCVISNMDAQIKLGVHGTTNLLPKVSFLDPTNTFSVGAYQTAAGSADILSHLMENYFNATEGTEVQDEIAEGLMKTVIKYLPVALDEPDNYIARANLMWASTLALNGLVGKGKKGSWSCHAMEHELSAFYDITHGVGLAMLTPRWMAHILDEDTLPKFQRFAEEVWNVKEKEPKRTAEIGIQKLYDFFVSCNIPMTLSGVGIQTEENFEEMGQRAVAHSSISNQGFVPLHEDDVVSIYRDCMSESSFV

SEQ ID NO: 28 - protein, 401 aa, Succinatimonas hippei
MESFDFFRRTRIIFGQSADNEVGQIIKYQGGTRVLLLHGEKAAIKYGIVERIGRTLDRSGLKYFSKGGIKSNPHIDKVYECIEFCLSNSINYILAVGGGSVIDTAKIVAAGVFFDGDIWDMFEKHREPYRSLPLGCVVTVPASGTECSNSSSLMREKDGRREKLIAYSNSFVPEFAILNPDLTLSLSPRVTASGCVDMINHVLEGYFSNSTGVLLSDKLCEAVLSSIIELLPQIYEDPNNIDARANLMLAATLSHNDICCMGRKSDNVITKLANQLVVENDCPFGDALAVLIPAWMEYVVQFNPLRIAQFSNRVFGIAINFEDPKITAYDGIKALRAFFKNVKLPCNFVELGIKTEAIADIVNALDLKEGKTLGSFVPLDAVACEAILSLAANYCEGRDIF

SEQ ID NO: 29 - protein, 428 aa, Halanaerobium hydrogeniformans
MSDYYDYMLPTVNFMGPGCVEVVGERCKILGAKKVLIVTDSFLRNMEGGPVDQVVKYLKKANLNYAFYDEVEPNPKDVNVYAGLKIYERENCDMIVTIGGGSAHDCGKAIGVAATHDGDLYKDYAGIEKLENETPPMVCVNTTAGTASEVTRHTVITDTSQTPNVKFVIVSWRNTPDVSINDPELMVGKPPGLTAATGMDALTHAVETYVSTNANALTDAAAIKSIELVANNLRKVVKDGQDIKARENMANASVLSGFAFNNGGLGYVHAMAHQLGGFYDMPHGIANAILLPYVEKFNLGTDVERFSNITEIFGKEQSKISNNPEAQESIKAIKDEIDKLKRFKKIAEVFGVDTSNMSTREAAEASLDAIKELARDIGIPSSLSESKFDVKRDDFEEMAKLALEDGNAGTNPRKGSVEDIVRIFEDAF

SEQ ID NO: 30 - protein, 388 aa, Citrobacter freundii
MSYRMFDYLVPNVNFFGPNAISVVGERCQLLGGNKALLVTDKGLRAIKDGAVDKTLHYLREAGIEVAIFDGVEPNPKDTNVRDGLAVFRREQCDIIVTVGGGSPHDCGKGIGIAATHEGAICTSMPESRPWTNPLPPIVAVNTTAGTASEVTRHCVLTNTESKVKFVIVSWRNLPSVSINDPLLMIGKPAALTAATGMDALTHAVEAYISKDASPVTDAAAMQAIRLIARNLRQAVALGSNLQARENMAYASLLAGMAFNNANLGYVHAMAHQLGGLYDMPHGVANAVLLPHVARYNLIANPEKFADIAELMGENITGLSTLDAAEKAIAAITRLSMDIGIPQHLRDLGVKEADFPYMAEMALKDGNAFSNPRKGNEQEIAAIFRQAF

SEQ ID NO: 31 - protein, 385 aa, Clostridium novyi
MRMYDYLLPNVNFMGPGCIKVIGERCKLLGAKKAFIVTGKHIGSMENGPLQIVVKYLTDEGIDYVHFSGSEPNPKDINVRKGVELFKKENCDMIITIGGGSAHDCGKGIGIGATHEGDLYDYAGIETLTNPLPPIVAVNTTAGTGSEVTRHCVLTNTEKKIKFVIVSWRNLPQVSINDPLLMVDMSPRLTAATGMDALTHAIEAYVSKDANVVTDAAAIQAIKLISKNLRKAVALGENLEARDNMANASLLAGMAFNNANLGYVHAMAHQLGGQYDLAHGVANAMLLPHVERYNIISNPEKFRDIAEFMGENIEGLSVMEAAEKAIDAMFKLAEDIGIPRRLRDVGVKEEDFEYMAGNALKDGNAFSNPRKGTEEDIVNIFKAAY

SEQ ID NO: 32 - protein, 383 aa, Pelobacter carbinolicus
MADFLCPAVNFIGAGTVAETGPRAAMFGTKALIVCDGFLAKLEGGPVSKVKDTLTSSGVEFAVYDGVEPNPKDTNVAAGLKIYKSENCDLIVTVGGGSSHDCGKGIGIAATHEGDLYEDYAGIETLTNELPPIIAVNTTAGTASEVTRHCVITNTAKKVKFVIVSWRNLPKVSINDPELMVAKPAGLTAATGMDALTHAVECYVTKDANPATDAVAIHAIKLIGKYLRRAVANGEDLEAREGMAYGSLLAGMAFNNAGLGYVHAMAHQLGGLLDMPHGIANAVLLPHIERYNLMVNPEKFADIAEAMGENIDGLGKMEAAEKAIDAIVRLSIDVGIPQHLADLGVKESDLEPMAKLAMQDGNAGTNPRVGKVEDIIQLFKNAM

SEQ ID NO: 33 - protein, 393 aa, Unknown
  Derived from Burkholderiaceae
MTDVVIVSAARTAVGKFGGSLAKIPAPELGAVVIKAALERAGVKPEQVSEVIMGQVLTAGSGQNPARQAAIKAGLPAMVPAMTINKVCGSGLKAVMLAANAIMAGDAEIVVAGGQENMSAAPHVLPGSRDGFRMGDAKLVDTMIVDGLWDVYNQYHMGITAENVAKEYGITREAQDEFAVGSQNKAEAAQKAGKFDEEIVPVLIPQRKGDPVAFKTDEFVRQGATLDSMSGLKPAFDKAGTVTAANASGLNDGAAAVVVMSAAKAKELGLTPLATIKSYANAGVDPKVMGMGPVPASKRALSRAEWTPQDLDLMEINEAFAAQALAVHQQMGWDTSKVNVNGGAIAIGHPIGASGCRILVTLLHEMKRRDAKKGLASLCIGGGMGVALAVERK

SEQ ID NO: 34 - protein, 246 aa, Ralstonia eutropha
MTQRIAYVTGGMGGIGTAICQRLAKDGFRVVAGCGPNSPRREKWLEQQKALGFDFIASEGNVADWDSTKTAFDKVKSEVGEVDVLINNAGITRDVVFRKMTRADWDAVIDTNLTSLFNVTKQVIDGMADRGWGRIVNISSVNGQKGQFGQTNYSTAKAGLHGFTMALAQEVATKGVTVNTVSPGYIATDMVKAIRQDVLDKIVATIPVKRLGLPEEIASICAWLSSEESGFSTGADFSLNGGLHMG

SEQ ID NO: 35 - protein, 282 aa, Clostridium acetobutylicum
MKKVCVIGAGTMGSGIAQAFAAKGFEVVLRDIKDEFVDRGLDFINKNLSKLVKKGKIEEATKVEILTRISGTVDLNMAADCDLVIEAAVERMDIKKQIFADLDNICKPETILASNTSSLSITEVASATKRPDKVIGMHFFNPAPVMKLVEVIRGIATSQETFDAVKETSIAIGKDPVEVAEAPGFVVNRILIPMINEAVGILAEGIASVEDIDKAMKLGANHPMGPLELGDFIGLDICLAIMDVLYSETGDSKYRPHTLLKKYVRAGWLGRKSGKGFYDYSK

SEQ ID NO: 36 - protein, 261 aa, Clostridium acetobutylicum
MELNNVILEKEGKVAVVTINRPKALNALNSDTLKEMDYVIGEIENDSEVLAVILTGAGEKSFVAGADISEMKEMNTIEGRKFGILGNKVFRRLELLEKPVIAAVNGFALGGGCEIAMSCDIRIASSNARFGQPEVGLGITPGFGGTQRLSRLVGMGMAKQLIFTAQNIKADEALRIGLVNKVVEPSELMNTAKEIANKIVSNAPVAVKLSKQAINRGMQCDIDTALAFESEAFGECFSTEDQKDAMTAFIEKRKIEGFKNR

SEQ ID NO: 37 - protein, 397 aa, Treponema denticola
MIVKPMVRNNICLNAHPQGCKKGVEDQIEYTKKRITAEVKAGAKAPKNVLVLGCSNGYGLASRITAAFGYGAATIGVSFEKAGSETKYGTPGWYNNLAFDEAAKREGLYSVTIDGDAFSDEIKAQVIEEAKKKGIKFDLIVYSLASPVRTDPDTGIMHKSVLKPFGKTFTGKTVDPFTGELKEISAEPANDEEAAATVKVMGGEDWERWIKQLSKEGLLEEGCITLAYSYIGPEATQALYRKGTIGKAKEHLEATAHRLNKENPSIRAFVSVNKGLVTRASAVIPVIPLYLASLFKVMKEKGNHEGCIEQITRLYAERLYRKDGTIPVDEENRIRIDDWELEEDVQKAVSALMEKVTGENAESLTDLAGYRHDFLASNGFDVEGINYEAEVERFDRI

SEQ ID NO: 38 - protein, 887 aa, Unknown
  Derived from Bacteria
MSERFPNDVDPIETRDWLQAIESVIREEGVERAQYLIDQLLAEARKGGVNVAAGTGISNYINTIPVEEQPEYPGNLELERRIRSAIRWNAIMTVLRASKKDLELGGHMASFQSSATIYDVCFNHFFRARNEQDGGDLVYFQGHISPGVYARAFLEGRLTQEQLDNFRQEVHGNGLSSYPHPKLMPEFWQFPTVSMGLGPIGAIYQAKFLKYLEHRGLKDTSKQTVYAFLGDGEMDEPESKGAITIATREKLDNLVFVINCNLQRLDGPVTGNGKIINELEGIFEGAGWNVIKVMWGSRWDELLRKDTSGKLIQLMNETVDGDYQTFKSKDGAYVREHFFGKYPETAALVADWTDEQIWALNRGGHDPKKIYAAFKKAQETKGKATVILAHTIKGYGMGDAAEGKNIAHQVKKMNMDGVRHIRDRFNVPVSDADIEKLPYITFPEGSEEHTYLHAQRQKLHGYLPSRQPNFTEKLELPSLQDFGALLEEQSKEISTTIAFVRALNVMLKNKSIKDRLVPIIADEARTFGMEGLFRQIGIYSPNGQQYTPQDREQVAYYKEDEKGQILQEGINELGAGCSWLAAATSYSTNNLPMIPFYIYYSMFGFQRIGDLCWAAGDQQARGFLIGGTSGRTTLNGEGLQHEDGHSHIQSLTIPNCISYDPAYAYEVAVIMHDGLERMYGEKQENVYYYITTLNENYHMPAMPEGAEEGIRKGIYKLETIEGSKGKVQLLGSGSILRHVREAAEILAKDYGVGSDVYSVTSFTELARDGQDCERWNMLHPLETPRVPYIAQVMNDAPAVASTDYMKLFAEQVRTYVPADDYRVLGTDGFGRSDSRENLRHHFEVDASYVVVAALGELAKRGEIDKKVVADAIAKFNIDADKVNPRLA

SEQ ID NO: 39 - protein, 630 aa, Unknown
  Derived from Bacteria
MAIEIKVPDIGADEVEITEILVKVGDKVEAEQSLITVEGDKASMEVPSPQAGIVKEIKVSVGDKTQTGALIMIFDSADGAADAAPAQAEEKKEAAPAAAPAAAAAKDVNVPDIGSDEVEVTEILVKVGDKVEAEQSLITVEGDKASMEVPAPFAGTVKEIKVNVGDKVSTGSLIMVFEVAGEAGAAAPAAKQEAAPAAAPAPAAGVKEVNVPDIGGDEVEVTEVMVKVGDKVAAEQSLITVEGDKASMEVPAPFAGVVKELKVNVGDKVKTGSLIMIFEVEGAAPAAAPAKQEAAAPAPAAKAEAPAAAPAAKAEGKSEFAENDAYVHATPLIRRLAREFGVNLAKVKGTGRKGRILREDVQAYVKEAIKRAEAAPAATGGGIPGMLPWPKVDFSKFGEIEEVELGRIQKISGANLSRNWVMIPHVTHFDKTDITELEAFRKQQNEEAAKRKLDVKITPVVFIMKAVAAALEQMPRFNSSLSEDGQRLTLKKYINIGVAVDTPNGLVVPVFKDVNKKGIIELSRELMTISKKARDGKLTAGEMQGGCFTISSIGGLGTTHFAPIVNAPEVAILGVSKSAMEPVWNGKEFVPRLMLPISLSFDHRVIDGADGARFITIINNTLSDIRRLVM

SEQ ID NO: 40 - protein, 495 aa, Escherichia coli
MDNGRHKKNVRPAGDKYIEVMMSTEIKTQVVVLGAGPAGYSAAFRCADLGLETVIVERYNTLGGVCLNVGCIPSKALLHVAKVIEEAKALAEHGIVFGEPKTDIDKIRTWKEKVINQLTGGLAGMAKGRKVKVVNGLGKFTGANTLEVEGENGKTVINFDNAIIAAGSRPIQLPFIPHEDPRIWDSTDALELKEVPERLLVMGGGIIGLEMGTVYHALGSQIDVVEMFDQVIPAADKDIVKVFTKRISKKFNLMLETKVTAVEAKEDGIYVTMEGKKAPAEPQRYDAVLVAIGRVPNGKNLDAGKAGVEVDDRGFIRVDKQLRTNVPHIFAIGDIVGQPMLAHKGVHEGHVAAEVIAGKKHYFDPKVIPSIAYTEPEVAWVGLTEKEAKEKGISYETATFPWAASGRAIASDCADGMTKLIFDKESHRVIGGAIVGTNGGELLGEIGLAIEMGCDAEDIALTIHAHPTLHESVGLAAEVFEGSITDLPNPKAKKK

SEQ ID NO: 41 - protein, 858 aa, Clostridium acetobutylicum
MKVTNQKELKQKLNELREAQKKFATYTQEQVDKIFKQCAIAAAKERINLAKLAVEETGIGLVEDKIIKNHFAAEYIYNKYKNEKTCGIIDHDDSLGITKVAEPIGIVAAIVPTTNPTSTAIFKSLISLKTRNAIFFSPHPRAKKSTIAAAKLILDAAVKAGAPKNIIGWIDEPSIELSQDLMSEADIILATGGPSMVKAAYSSGKPAIGVGAGNTPAIIDESADIDMAVSSIILSKTYDNGVICASEQSILVMNSIYEKVKEEFVKRGSYILNQNEIAKIKETMFKNGAINADIVGKSAYIIAKMAGIEVPQTTKILIGEVQSVEKSELFSHEKLSPVLAMYKVKDFDEALKKAQRLIELGGSGHTSSLYIDSQNNKDKVKEFGLAMKTSRTFINMPSSQGASGDLYNFAIAPSFTLGCGTWGGNSVSQNVEPKHLLNIKSVAERRENMLWFKVPQKIYFKYGCLRFALKELKDMNKKRAFIVTDKDLFKLGYVNKITKVLDEIDIKYSIFTDIKSDPTIDSVKKGAKEMLNFEPDTIISIGGGSPMDAAKVMHLLYEYPEAEIENLAINFMDIRKRICNFPKLGTKAISVAIPTTAGTGSEATPFAVITNDETGMKYPLTSYELTPNMAIIDTELMLNMPRKLTAATGIDALVHAIEAYVSVMATDYTDELALRAIKMIFKYLPRAYKNGTNDIEAREKMAHASNIAGMAFANAFLGVCHSMAHKLGAMHHVPHGIACAVLIEEVIKYNATDCPTKQTAFPQYKSPNAKRKYAEIAEYLNLKGTSDTEKVTALIEAISKLKIDLSIPQNISAAGINKKDFYNTLDKMSELAFDDQCTTANPRYPLISELKDIYIKSF

SEQ ID NO: 42 - protein, 915 aa, Atopobium vaginae
MAKQVKAAAQPQEEKPTRVAAASPDVELKPTSKNSAELVSSLIEQESIVRITTEEDLTNLMTKMRKAQAKFATFTQEQVDKIFFAAAMAADNARIPLAQVAVAETGMGLVEDKVIKNHFAAEYIYNAYRRTKTCGVIFEDKSYGMKHIAEPIGIVAAVIPTTNPTSTAIFKSLLCIKTRNAIIISPHPRARKATLAAARVVRKAAEAAGLPQDILVCIDTPSIELTNLLMQKADIILATGGPGMVKAAYSSGKPALGVGPGNNPAIIDDSADIKLSVNSIIHSKVFDYGTICASENSVIVVDSVYDQVKDEFARRGCYFLQGDDIAKVGNTVIKNGNINAAIVGKPAPYIAKMADVTVPERTKILMAEVTSVEPEEPWSHEKLSPVLAFYRAKDFNTAVSMAERLIAEGGYGHTASLFINTNEHEKLEKYENAMKTCRVLINTPAAQGGIGDIYNFMLTPSLTLGCGAWGGNSVCGNVGVMNLLNIKQVAQRRENMLWLQTPDKVYFKKGCMPEALKELKYKLNKKRVFIITDQFLYKSGFTKPIESTLDELGIVHSCFWNVEPDPSLQSAEEGLQQLRAFEPDTIMAIGGGSAMDCGKIIWFLYENPEESFANMAADFMDIRKRVYEFPQMGKKAYFVAIPTSSGTGSEVSPYAIITDKTTGVKWPIADYELMPDMAIVDTDNMMTQPRGLTSASGADAMTHCLESYVSTLASDYTEPLSLKGFKLIIDYLPTAYNEPNNVEARDHMANASCIAGLAFSNAFLGLVHSMAHKLGAFHHIPHGWANGLLLCRVMRYNAAEKPTRMGTFPQYAYPHAKERYCEMARYIGITGANDDEVFEKLIEKVQSTLDTVGVKRTIAEYNVDEKYFLDTLDEMAEQAFNDQCTVSNPRYPLIEEIKNIYLDAYYGRTPSFYEE

SEQ ID NO: 43 - protein, 878 aa, Ruminococcus albus
MAKTTAKKNEPIFVDSVEALSAKIKEVRAAQAEFATYTQEQVDKIFKAAALAANKARLPLAKMAVEETGMGIVEDKVIKNNYAAEHIYNAYKNVQTCGVFETNEAYGTTKIYEPIGLIAAVIPTTNPTSTAIFKTLISLKTRNGIIISPHPRAKNCTIAAAKIVLDAAVAAGAPENIIGWIDVPSLDMTNQIMRDSDLILATGGPGMVKSAYSSGTPALGVGAGNASAIIDASADIKVAVSSIIHSKTFDNGMICATEQTLIVDKKIYKEVKAELKARGCYFLNDEEADKVRHTMIINGSLNAKIVGQRPVTIAKLCGFEVPEDVKVLIGEATSTDREEAFGHEKLTTVLGMYKADNFDDALDKAETLLENNGGLGHTSVLWIDNVNEREKLLKFAERLKTSRLIVNTPSSLGGIGDLYNFNFAPSLTLGCGSWGGNSVSENVGVKHLLNVKTVVERRENMLWFRAPEKVYFKKGCLPVALDELKNVMGKKKAFIVTDQFLYKNGYTKPITDKLDQMGIAHNVFFDVAPDPSLGCALEGVKAIRAFEPDTIIAIGGGSAMDAAKIMWVMYEHPEADFMDMAMRFIDIRKRVYTFPKMGEKAYFICIPTSSGTGSEVTPFAVITDEKTGHKYPLADYALLPNMAIVDTDLMMSAPKGLTAASGLDCMVHDLEALASVMATDFTDGIALQSLKITFENLPECVDNGQTAYKAREKMAHAATMAGMAFANAFLGIGHSLAHKLGAYHHLPHGICCALVITNVMKFNANPVPTKMGTFSQYEYPKTLEKYADVARSLGLFGKDDKACFKMLCDKVEELKERVGCKKTIAEYGISEEDFLATLDKMAEDAFDDQCTGANPRYPLIEELKEIYKACYYGTEYKG

SEQ ID NO: 44 - protein, 872 aa, Atopobium rimae
MTKKATKIEDVETLHVRLAEMREAQAEFATFSQEQVDKIFYEAALAAEKARVPLAHMAVEETGMGVMEDKVIKNHYAAEYIFNKYKHMKTCGVVEEDKAGGYKVVAEPMGIVAAVIPTTNPTSTAIFKSLLALKTRNAILISPHPRAKGCTIEAARIVRDAAEKAGCPKGIIDWVPSPTIELTAAVMGNADIILATGGPGMVNAAYSSGKPALGVGPGNTPAIIDDTADIKLAVNSIIHSKTFDNGMICASEQSVTVLDGVYDEVKKEFAARGCYFLKGKELDAVRKTVIINGAVNAGIVGKSAHFIAETAGVKVPEGTKILIGEVTSVEPSEEMAHEKLSPVLGMYRAKNFDDALAKAERLVADGGYGHTSSLYVNVNETEKIQKHYEAMKTCRILINTPSSQGGIGDLYNFKMTPSLTLGCGTWGGNSVSGNVGPQHLLNYKSVAERRENMLWLRTPEKVYFKKGCMPVALRELKDVYDKKRAFIVTDQFLYKSGFTKKIEESLDEMGIVHSSFWDVAPDPTLQCALEGLARLRAFEPDCIIAIGGGSAMDAGKIMWSMYENPDENFEDMSADFMDIRKRVYNFPKMGKKAFFIAIPTSSGTGSEVTPFAIITDADTGVKWPVTDYELMPNMAIVDTDNMMTQPKGLTSASGIDVLTHCLEAYVSMMASDYTDGLALRGMKLVFDYLPRAYENPNDVEARDHMANASCLGGLAFANAFLGVNHSMAHKLGAFHHIPHGWANAVILTRVMRYNASERPAKMGTFPQYDHPHTLARYAEAGRYCGVEGKDDWDVFEKFVAKIEELKDFIGVKKTIKDYGVDEKYFLDTLDAMSEQAFNDQCTGANPRYPLISEIKDLYLDSYYGREATSYDI

SEQ ID NO: 45 - protein, 869 aa, Clostridium cellulovorans
MKVTNVEQLKKRIAQIREAQRKFAEFSQEQVDKIFREAAMAALNERISLAKLAVEETRMGVFEDKVIKNHLASEYVYNKYKNEKTCGVLETDDAFGITKVAEPIGVVAAIVPTTNPTSTAIFKSLIALKTRNGIIFSPHPRAKKSTIAAAKIVLDAAVKAGAPEGIIGWIDEPSIELSQIVMQEADITLATGGSALVKAAYSSGKPALGVGAGNTPVIIDETAHIKMAVNSILLSKTFDNGVICASEQAIVVIDKIYDEVKNEFIERGAYFLKDDELDKVRKTIMINGAVNPDIVGQTAYKIAQLAGIEVSEATKVLIGEVELIGPEEPLSHEKLSPVLAMYKVRSFDEALQKTTKLLAYGGMGHTSVLYTDELLCKDRIESFGAAMKTSRTFINMPASHGAAGDTYNFKVPPSFTLGCGSWGGNSVSENVGVKHLLNVKSVARRRENMLWFKVPEKIYFKYGCLGMALEELKDMEKKKAFIVTDKVLYDLGVLDNVTKVLDKIGVDYRIFYDVQPDPTLESARKGAKEMINFEPDTIIAVGGGSPMDAAKIMWVLYEQPDVAFEDLAMIFMDIRKRIYNMPKIGKKATFVAVPTSAGTGSEVTPFAVITDEKTGVKYPLADYQLTPGMAIIDAELMMNMPKGLTAASGIDALTHAIEAYVSVLASDYTNGLALEAARLIFKYLPLAYTEGRTNIKAREKMAHASTIAGMAFANAFLGVCHSMAHKLGAEHHVPHGTANALLINEVIRFNSVEDPRKQAAFPQYKYPNAKSRYAKMADYLQLGGGTEDEKIEALINAIDQLKLKLNLPMTIKEAGVSEKKFYASLDKMSELSFDDLCTGANPRYPLISEIKKMFINVFDNTQETVIREE

SEQ ID NO: 46 - protein, 876 aa, Unknown
  Pedobacter sp. BAL39
METNAEKLIKKIEKIREAQVQFSTFSQEQVDEIFRQSAIAANNARIQLAKLAVEETGMGLVEDKVIKNHFASEYIYNQYKDEKTCGVIETDEAFGITKIAEPIGVIAAVVPTTNPTSTAIFKALIALKTRNGIIFSPHPRAKNATIAAAKIILDAAVKAGAPENIIGWIEEPSVELSQIVMSQADLILATGGPGMVKAAYSSGKPAIGVGAGNTPAIVDETAHIKMAANSILLSKTFDNGMICASEQSVIVVDKVYNEMKQEFLDRGAYILSKSETSKVGALLLINGVLNANIVGQPASKIAALAGITVPEETKILIGEVTSVELDEPFSHEKLSTVLAMYRAKDFDEALTKAIRLVKLGGFGHTSVLYTDPAVSQDRIDKFGAAMKTGRTIINMPSSQGAIGDIFNFKLSPSLTLGCGSWGGNSVSENVGVKHLLNIKSVASRRENMLWFRVPEKVYFKYGCLPVALRELKELGKKKVFIVTDKVLFALGYAERVTRILDELDIAHTVYFDVDPDPTLITARKGAAEMINFQPDAILALGGGSPMDAAKIMWVLYEHPEERFEDLAMRFMDIRKRVYPFPKMGVKANFIAVPTSAGTGSEVTPFAVITDELTDIKYPLADYELTPDIAIVDAELMMNMPKGLTSASGIDALTHALESYVSVLASEFTNGLALEAIRLIFKYLPDAYNEGTTNIKAREKMAHASTIAGMAFANAFLGICHSLAHKLGATHHVAHGVANAMLISEVIRFNAVENPRKQTAFPQYKYPNARWRYAQIADYLKLGGETEAEKVELLIAAIEDLKVKVGIPKSIREYGIDETKFLNSLDTMSEQAFDDQCTGANPRYPLISELKKIYIKAYEGPQEVTPEELKLEELAEA

SEQ ID NO: 47 - protein, 862 aa, Clostridium acetobutylicum
MKVTTVKELDEKLKVIKEAQKKFSCYSQEMVDEIFRNAAMAAIDARIELAKAAVLETGMGLVEDKVIKNHFAGEYIYNKYKDEKTCGIIERNEPYGITKIAEPIGVVAAIIPVTNPTSTTIFKSLISLKTRNGIFFSPHPRAKKSTILAAKTILDAAVKSGAPENIIGWIDEPSIELTQYLMQKADITLATGGPSLVKSAYSSGKPAIGVGPGNTPVIIDESAHIKMAVSSIILSKTYDNGVICASEQSVIVLKSIYNKVKDEFQERGAYIIKKNELDKVREVIFKDGSVNPKIVGQSAYTIAAMAGIKVPKTTRILIGEVTSLGEEEPFAHEKLSPVLAMYEADNFDDALKKAVTLINLGGLGHTSGIYADEIKARDKIDRFSSAMKTVRTFVNIPTSQGASGDLYNFRIPPSFTLGCGFWGGNSVSENVGPKHLLNIKTVAERRENMLWFRVPHKVYFKFGCLQFALKDLKDLKKKRAFIVTDSDPYNLNYVDSIIKILEHLDIDFKVFNKVGREADLKTIKKATEEMSSFMPDTIIALGGTPEMSSAKLMWVLYEHPEVKFEDLAIKFMDIRKRIYTFPKLGKKAMLVAITTSAGSGSEVTPFALVTDNNTGNKYMLADYEMTPNMAIVDAELMMKMPKGLTAYSGIDALVNSIEAYTSVYASEYTNGLALEAIRLIFKYLPEAYKNGRTNEKAREKMAHASTMAGMASANAFLGLCHSMAIKLSSEHNIPSGIANALLIEEVIKFNAVDNPVKQAPCPQYKYPNTIFRYARIADYIKLGGNTDEEKVDLLINKIHELKKALNIPTSIKDAGVLEENFYSSLDRISELALDDQCTGANPRFPLTSEIKEMYINCFKKQP

SEQ ID NO: 48 - protein, 875 aa, Leptotrichia hofstadii
MAVVKDLESLKALIQRVRKAQEEFATFDQERVDKIFRKVAQKMNDERITLANLAVAETGMGIVEDKVIKNHFASEYIYNKYKDEKTCGVLEDDRSYGVKKIATPIGIIAGIVPTTNPTSTAMFKTLISLKTRNAIIFSPHPRAKQATIETAKIALETAVKYGAPKDIIGWIDEPSVELSRELMASADLILATGGPGMVKSAYSSGTPAIGVGAGNTPVVIDKSADIKMTANYILMSKTFDNGVICATEQSVIIDKEIYDKVRSEFLNRGAYILNEEELNKVREILFINGNLNADVVGKSAYVIAGMAGFEIPKSSKVLIGEVESTGIEEPFAHEKLSPVLAMYKSEDFEDGLKKADELVRLGGLGHTSSLYINLAEKEKIDKFGRLMKTGRTLINMPASLGAIGDVFNFKLEPSLTLGCGSWGGNSVSENVGVKHLLNVKTIAERRENMLWFKVPEKIYFKYGSLPTALEELKGSHKKAFIVTDKVLAELGYTEHITKVLDSIHIDYRIFSEVKEDPTLSSAQAGAKAMLEYNPDVVIALGGGSAMDAAKIMWVLYEHPELRFRDLAMRFMDIRKRIVEFPEMGKKAKFVAVATSAGTGSEVTPFSVITDDETGIKYPLADYALTPNVAINDPELMLTMPKGLTVASGIDVFTHALESYVSVMATEYTKPYSKEAARLVFKYLPESVELGSKAIKAKEKMANASCLAGMAFANAFLGINHSLAHKLGGKFHVPHGIANAMLLEEVIRFNAAEAPTKMGLFPQYRYPDAMQRYAEMNDYLGFGGNTKEEKVENLIKGINELNRKIGIPASIKEWGVPEKDFLEAVDEMSLDAFDDQCTPANPRYPLMEELREIYLKAYYGKEWENEKERVAKILGF

SEQ ID NO: 49 - protein, 880 aa, Peptoclostridium difficile
MEKKEKVVEKSNVEVCSPEIVNSVETLRMRLEEIRLAQKEFATFTQEQVDKIFLAASTAANQQRIPLAKMAVEETGMGIVEDKVIKNHFASEYIYNAYKDTKTCGVIEKDEAFGFTRIAEPVGVLSAVIPTTNPTSTAIFKSLIALKTRNGIIFSPHPRAKNCTIEAARVVHDAAVKAGAPKGLIGWVDVPSIELTNVVMAEADLILATGGPGMVKSAYSSGKPAVGVGPGNVPAIIDESADIKMAVSSILVSKSFDNGMICASEQAVIVPEKIYEEVKKEFKYRGAHFLNKEETEKVGKVVIIDGSLNARIVGQPAHVIAKMADVEVPKTARIIIGEVESVELNEPFAHEKLSPVLAMYKSKSFEDAVAKAEKLVADGGYGHTSSLYADSINHPERVEKFVNAMKTCRVLVNTPSSQGGIGDLYNFKLAPSLTLGCGSWGGNSVSENVGVKHLLNIKTVAERRENMLWFRAPEKVYFKKGCLGVAAREFKDVMDKKKAFIVTDSFLYNNGYTKKLTDLLDEMGIKHTTFFDVAPDPTLACAREGAKAMADFQPDLIIAVGGGSAMDAGKIMWVMYEHPEVDFQDLAMRFMDIRKRVYVFPKMGEKAYFAAIPTSAGTGSEVTPFAVITDQDSGVKYPLADYELMPNMAIIDADMMMEMPPRLTAASGVDALTHALEAYVSMLRTEPADGLALQAGKIIFEYLPRAYKNGKNDKEAREKMAMASTMAGMSFANAFLGICHSLAHKLGAFHHVQHGVANALLINEVIKFNCAEAPNKMGAFSQYRYPDCIQRYAEFASFAGIKGSTDQEKVDNLIKAIDELKAKVGLPKTIKEAGVEESKFLERLDAMVEQAFDDQCTGANPRYPLMSELKEIYLKVYYGK

SEQ ID NO: 50 - protein, 876 aa, Clostridium botulinum
MKVTNPEELTQRIKELREAQKKFAHFTQEQVDEIFRQAAMAANDNRIKLAKMAVEETGMGIVEDKVVKNHFAAEYIYNQYKDMKTCGVLEEDFTYGIEKVAEPIGVIAAIVPTTNPTSTAIFKTLIALKTRNAIIISPHPRAKNATIAAAKIVLDAAVKAGAPSGIIGWIDEPSVELSQNVMRESDIILATGGPAMVKAAYSSGRPALGVGAGNTPAIIDETAHIKMAVNSILLSKTFDNGVICASEQSLVVLDEVYDEVKKELSARGAYILKGDEVDKVRKIILNEKGGLNADMVGQPAYKIAAMGGVTIPESSKVLVAEVESVELEEPFSHEKLSPVLAMYRAKSFEEALDKADRLIILGGMGHTSILYTDEIKCKDRIEAFGERMKTARTLINMPASQGAIGDLFNFKLAPSLTLGCGSWGGNSVSENVGPKHLINVKTVAKRRENMLWFRVPEKTYFKYGCLPVALQELGDMGKKKAFIVTDRVLFDLGYTDKITEILERNKIHYKIFAEVEPDPTLKCAKAGAREMLSFNPDVIISLGGGSAMDAAKIMWVMYEHPEVRFEDLAMRFMDIRKRVFKFPVLGEKAMMVAVATSAGTGSEVTPFAVITDEESGVKYPLADYELTPDMAIVDAELMMTSPKGLTACAGIDVLVHSIEAYVSIMASEFTNGLALEAIRLVFKYLPDAYNEGLTNIKAREKMAHASCMAGMAFSNAFLGICHSMAHKLGAFHHLPHGMANSLLINEVIRFNASDAPTKQAAFAQYKYPNAEYRFARIADYLHLGGSSDKEKVELLTKAIEDLQRKVNMPMTIKDAGVSEDKFQATLDEMVEQAFDDQCTGANPRYPLMSELKEIYINAYHGKAKKIENVKKNSKKK

SEQ ID NO: 51 - protein, 877 aa, Clostridium ljungdahlii
MKVTKVTNVEELMKKLDEVTAAQKKFSSYTQEQVDEIFRQAAMAANSARIDLAKMAVEESGMGIVEDKVIKNHFVAEYIYNKYKGEKTCGVLEQDEGFGMVRIAEPVGVIAAVVPTTNPTSTAIFKSLIALKTRNGIVFSPHPRAKKSTIAAAKIVLDAAVKAGAPEGIIGWIDEPSIELSQVVMKEADLILATGGPGMVKAAYSSGKPAIGVGPGNTPAVIDESADIKMAVNSILLSKTFDNGMICASEQSVVVASSIYDEVKKEFADRGAYILSKDETEKVGKTIIINGALNAGIVGQSAFKIAQMAGVSVPEDAKVLIGEVKSVEPEEEPFAHEKLSPVLAMYKAKDFDEALLKAGRLVERGGIGHTSVLYVNAMTEKVKVEKFRETMKTGRTLINMPSAQGAIGDIYNFKLAPSLTLGCGSWGGNSVSENVGPKHLLNIKSVAERRENMLWFRVPEKVYFKYGSLGVALKELRIMEKKKAFIVTDKVLYQLGYVDKITKNLDELRVSYKIFTDVEPDPTLATAKKGAAELLAYEPDTIIAVGGGSAMDAAKIMWVMYEHPEVRFEDLAMRFMDIRKRVYVFPKMGEKAMMISVATSAGTGSEVTPFAVITDERTGAKYPLADYELTPNMAIVDAELMMGMPKGLTAASGIDALTHALEAYVSIMASEYTNGLALEATRLVFKYLPIAYTEGTTNVKAREKMAHASCIAGMAFANAFLGVCHSMAHKLGAQHHIPHGIANALMIDEVIKFNAVEAPRKQAAFPQYKYPNVKRRYARIADYLNLGGSTDDEKVQFLINAIDDLKTKLNIPKTIKEAGVSEDKFYATLDTMSELAFDDQCTGANPRYPLIGEIKQMYINAFDTPKATVEKKTRKKK

SEQ ID NO: 52 - protein, 865 aa, Clostridium perfringens
MKVTNVDELMLRLEKVRAAQKEFSKFSQEQVDEIFRQAAVAANNERIRLAKMAVEESGMGIVEDKVIKNHFAAEYIYNKYKNEKTCGVIEKDESFGITKIAEPIGVVAAIVPTTNPTSTAIFKALISLKTRNAVFFSPHPRAKNSTIEAARVVLEAAVKAGAPKDIIGWIDEPSVEMSQVLMAEADIILATGGPGMVKAAYSSGKPAIGVGAGNTPAIIDETAHLKMAVNSILLSKTFDNGVICASEQTVLVVDKVYDEVRKEFADRGAYFLKDKEIDKVRKTILINGNLNANIVGQSAWKIADMAGVKVPKDTKVLIGEVESVELEEPFSHEKLSPVLGMYRVANFEEALVKAERLVELGGFGHTSVLYTDTMKSQDRVKKFGATMKTGRTIINMPSTQGAIGDIYNFKLAPSLTLGCGSWGGNSVSENVGPKHLINVKSVAERRENMLWFRVPEKVYFKYGALGVALRELKDLNKKKVFIVTDNVLASLGYVDKITNVLEEIGVDFRVFSEVTPDPTLECAKKGAEAMRSYQPDTIIALGGGSPMDAAKIMWVMYEHPEVAFEDLAMRFMDIRKRVYPFPTMGQKAMMISVPTSAGTGSEVTPFAVITDEESGVKYPLADYELTPDMAIIDAELMMNMPKGLTAASGIDALTHALEAYVSVLASEYTNGLALEAIRLIFKYLPQAYAEGTTNIKAREKMAHASTMAGMAFANAFLGVCHSMAHKLGSEHHIAHGVANGILIDHVIRFNAVDNPRKQAAFPQYKYPNAKWRYTVIADYLGLGGKNEEEKVNNLIKAIDNLKKTVGIPATIADCGVSKEAFYATLEKMSEDAFDDQCTGANPRYPLISEIKQMYINAFEGKKDRV

SEQ ID NO: 53 - protein, 882 aa, Collinsella stercoris
MAKKPTVAAAPEVVDSIESLEAKLELMREAQGIFATYSQEQVDKIFYEAAMAANKARIPLAKMAVEETGRGVLEDKVIKNHYAAEYIYNAYKNTKTCGVIERDDAYGITKIAEPIGIVGAVIPTTNPTSTAIFKCLICLKTRNAIIISPHPAAAKCTIAAAKLVLEAAVKAGAPEGIIGWVDVPSIDLTNKVMADVDIILATGGPGMVKAAYSSGKPALGVGAGNTPVIIDDTADIKLAVNSIIHSKTFDNGMICASEQSVTVLESIYKEVKDEFARRGCYFVKKGAEMEALRGAMFKNGALDHRIPGMPAAKIAELAGIEVPAKTKILIAEVTSTDPEKEEFSHEKLSPVLAMYKAKSFQEAVDKAEHLVLAGGPGHTASLYVHPAQAEKIALFEDTMKACRIVINTPSSQGGIGDLYNFGMKPSLTLGCGSWGGNSVSENVGVKHLLNVKTVAERRENMLWFRAPEKVYFKKGSTPVALDELGTVMGKKRAFIVTDQFLFKNGNTRAIEAKLDEMGIAHDCFYDVEPDPSLQCARRGAAQMALFEPDVIIAVGGGSAMDAGKIMWMMYEHPECNFEDMAMDFMDIRKRVFTFPKMGEKAYFVAIPTSSGTGSECTPFAIITDKDTGIKWPLADYALLPNMAIVDVDNAMTAPKGLTAASGIDVMTHAIESYVSIMASDYTKGLSMKAAKLVFENLPSSYENGAKDPHAREEMHNASCMAGMAFANAFLGLNHSMAHKLGAFHHLPHGIANAVILTRVMRYNAAEAPVKMGTFSQYPYPNALHNYAEMAKYCGIEGKDDKEVFENFITKLEELKDFIGVKKTIADYGVDEAYFLETLDEMTEQAFNDQCTGANPRYPLMSEIKELYLDAFYGREPQDYAVL

SEQ ID NO: 54 - protein, 867 aa, Clostridium cellulolyticum
MTKKNMVVNSVDTLLVKLAEIRKAQKEYSTFTQEQVDKIFLAASLAANKKRIPLSKMAQAETGMGVIEDKVIKNHYAAEYIYNAYKDTQTCGVIERDEAFGITKIAEPLGVVAAIVPTTNPTSTAIFKALIALKTRNGIIFSPHPRAKKCTIEAANVILEAAVAAGAPKGIIGWIDEPSIELSERVMKEADIILATGGPGMVKAAYSSGKPAIGVGPGNVPAIIDESADIKTAVSSIIVSKTFDNGMICASEQSVIVLDKIYNEVRKEFILRGAYMLNKEETQKVREVILVNGALNAKIVGQTASTIAKLAGFEVPAETKVLVGEVESVELSEAFAHEKLSPVLAMYKAKTFDDAVSKAERLIADGGFGHTASLYIDTVNSKDKLDKFTAAMKTCRILINTPSAQGGIGDLYNFKLAPSLTLGCGSWGGNSVSENVGVKHLINIKTVAERRENMLWFRAPEKVYFKKGCLGVALRELKTEMNKQRAFIVTDSFLYNNGYTKAVTNLLDDMNIKHHTFFDVAPDPTLACAKLGAEAMRDFKPDVIIAIGGGSAMDAGKIMWTLYEHPEVDFQDLAMRFMDIRKRVYTFPKIGEKAYFVAIPTSAGTGSEVTPFAVITDEQSGVKYPLADYELMPKMAIVDADLMMNMPKGLTAASGIDALTHAVEAYASMLLTDYTKGLALQATKNIFEYLPSAYENGAKDPIAREKMADASTMAGMAFANSFLGICHSMAHKLGAFHHLPHGVANALLITEVMKFNIAEAPTKMGAFSQYKYPEILKRYAEVASFIGITGSTDEEKFKKLIAKIDELKAKVGLPKTIKEAGVDEEKFLATLDEMVEQAFDDQCTGANPRYPLLSEIKDMYLKVYYGK

SEQ ID NO: 55 - protein, 862 aa, Clostridium botulinum
MKITTTEELIRKIEKIKEAQKIYSTYSQDKVDKIFKAAATAANKERIKLAKMAVEETGMGIVEDKVIKNHFASEYIYNKYKDEKTCGVIEKDEAFGLTKIAEPIGVIAAIVPTTNPTSTAIFKALIALKTRNGIIFSPHPRAKKSTIMAAKIVLDAAVQAGAPKEIIGWIDEPTLELSNAVMSNSNLVLATGGPGMVKAAYSSGKPAIGVGPGNVPAIIHETADIKMAVSSVVLSKTFDNGMICASEQSVIVMNSIYEEVKKEFVIRGAYVLNKEEIEKVKKIILVNGNVNAKIVGQTPQKIGEMAGIQVPDWAKLLVGEVQSVELEEPFSHEKLSPVLAMYKVKTYEEALAKAERLVELGGFGHTSSLYINTIKCKEEVEKFSNNMKTGRTIINMPSAQGGIGDIYNFKLAPSLTLGCGSWGGNSVSENVGPKHLLNIKNVAERRENMLWFRVPEKVYFKYGCLPIALKELKRMNKKKAFIVTDKVLYELGVAKKATDVLDEIGINYKVFFDVAPDPTLETAKKGAKEMVDFNPDTIIAIGGGSAMDAAKIMWVMYEHPEVEFEDLAMRFMDIRKRVYEFPHMGDKAMMISVATSAGTGSEVTPFAVITDEKTGMKYPLADYELTPDMAIVDADLMLNMPKGLTAASGIDALTHAVEAYVSVMASEYTDGLCLEAIKTIFEYLPKAYKEGAQDIEAREKMAHASTIAGMAFANAFLGVCHSMAHKLGSMHHVPHGIANALLINETIKFNSEDMPRKQTAFPQYKYPNAKAKYANIADYLSLGGKTLEEKVELLIKAIDKLKAEVNIPTSIEEAGVSKDKFFTTLDEMSEQAFDDQCTGANPRYPLISEIKEMYTNVFSNRK

SEQ ID NO: 56 - protein, 905 aa, Ruminococcus albus
MAKKEYEIVDGVEKLEAALERVRAAQRKMATFTQEQVDRIFLAAATAANRARIDLAEQAVAETGMGIVEDKVIKNHYASEYIYNKYRDTKTCGVLEEDKSAGIKKIAEPIGVIGAVIPTTNPTSTAIFKSLIALKTRNGIIISPHPRAKESTIAAAKVVLEAAVEAGAPEDIIAWIDIPSLEMTNMLMKEVDIILATGGPGMVHAAYSSGKPALGVGAGNTPAIIDESADILLAVNSIIHSKTFDNGMICASEQSVIVLDSIYDAVKTEFAARGCYFLKPDELNKVRKTIIINGALNAKIVGQSAAKIAELAGVTVPEGSKILIGEVESVDISEEFAHEKLSPVLAMYKASDIQDAFGKAEHLIADGGYGHTASIYLDAVREQEKLSEFGERMKTCRILVNTPSSQGGIGDLYNFKLAPSLTLGCGSWGGNSVSENVGVKHLLNIKTVAERRENMLWFRAPEKVYFKKGCLPVALDELKNVMGKKKAFIVTDSFLFKNGFTKPVTDKLDEMGIVHETFSDVAPDPTLACAVEGVKAIRSFEPDVIIAIGGGSAMDAAKIMWVMYEHPEADFMDMAMRFVDIRKRIYTFPKMGEKAYFICVPTSSGTGSEVTPFAVITDDKTGHKYPLADYELMPNIAIVDTDMMMSAPKGLTAASGLDCMVHDLEALVSVMATPFTDGIALESLKMTFDNLPECVENGQTAVRARENMAHAATMAGMAFANAFLGIGHSLAHKLGAYHHLPHGICCALVISEVIRFNASDVPVKMGTFPQYEYPQAAAKYARIARYLGVQGSGDNELVEGLIAKIEELKEAVGCKKTIAEYGISEEDFLATLDKMSRDAFDDQCTGANPRYPLISELKQIYMNVYYGRTFTETEKPDASQIDSSESSKDFKQAFNRAASSGKKRV

SEQ ID NO: 57 - protein, 604 aa, Clostridium cellulovorans
MKVTNVEQLKKRIAQIREAQRKFAEFSQEQVDKIFREAAMAALNERISLAKLAVEETRMGVFEDKVIKNHLASEYVYNKYKNEKTCGVLETDDAFGITKVAEPIGVVAAIVPTTNPTSTAIFKSLIALKTRNGIIFSPHPRAKKSTIAAAKIVLDAAVKAGAPEGIIGWIDEPSIELSQIVMQEADITLATGGSALVKAAYSSGKPALGVGAGNTPVIIDETAHIKMAVNSILLSKTFDNGVICASEQAIVVIDKIYDEVKNEFIERGAYFLKDDELDKVRKTIMINGAVNPDIVGQTAYKIAQLAGIEVSEATKVLIGEVELIGPEEPLSHEKLSPVLAMYKVRSFDEALQKTTKLLAYGGMGHTSVLYTDELLCKDRIESFGAAMKTSRTFINMPASHGAAGDTYNFKVPPSFTLGCGSWGGNSVSENVGVKHLLNVKSVARRRENMLWFKVPEKIYFKYGCLGMALEELKDMEKKKAFIVTDKVLYDLGVLDNVTKVLDKIGVDYRIFYDVQPDPTLESARKGAKEMINFEPDTIIAVGGGSPMDAAKIMWVLYEQPDVAFEDLAMIFMDIRKRIYNMPKIGKKATFVAVPTSAGTGSEVT

SEQ ID NO: 58 - protein, 600 aa, Clostridium hylemonae
MAKKKEAVPAVVDSVETLGAKMKAMREAQKVFATYTQEQVDKIFYEAALAANKMRIPLAKQAVEETGRGIVEDKVIKNHYAAEYIYNAYKDTKTCGVIEEDKALGIKKIAEPIGLVAAVIPTTNPTSTAIFKTLICLKTRNAIIISPHPSAKASTIAAAKIVLDAAVKAGAPEGIIGWIDVPSLELTNMVMKDADIILATGGPGMVKAAYSSGKPALGVGAGNTPVIIDDTADIRMAVNSIIHSKTFDNGMICASEQSVTVLDSVYDEVKKEFAYRGCYFLKKGEELDKVRKTIIINGALNNKIPGKSAYEIARLAGVEVPEDTKILIGEVESVDISEEFAHEKLSPVLGMYRAKTFDDALAKAEQLVADGGYGHTASLYVHPAEQEKIAKHAAAMKTCRILINTPSSHGGIGDLYNFKLAPSLTLGCGSWGGNSVSENVGVKHLINIKTVAERRENMLWFRTPEKVYFKKGCMPVALDELGTVMKKKKAFIVTDSFLYKNGYVAPIEEKLDEMGIQHTCFYEVAPDPTLQCAQKGTDQMKQFEPDTIIALGGGSAMDAAKIMWVMYEHPDVNFEDMAMDFMDIRKRVYTFPKMGKKLTL

SEQ ID NO: 59 - protein, 468 aa, Clostridium beijerinckii; identical to SEQ ID NO: 16

SEQ ID NO: 60 - protein, 858 aa, Artificial Sequence
  Synthetic Construct
MKVTNQKELKQKLNELREAQKKFATYTQEQVDKIFKQCAIAAAKERINLAKLAVEETGIGLVEDKIIKNHFAAEYIYNKYKNEKTCGIIDHDDSLGITKVAEPIGIVAAIVPTTNPTSTAIFKSLISLKTRNAIFFSPHPRAKKSTIAAAKLILDAAVKAGAPKNIIGWIDEPSIELSQDLMSEADIILATGGPSMVKAAYSSGKPAIGVGAGNTPAIIDESADIDMAVSSIILSKTYDNGVICASEQSILVMNSIYEKVKEEFVKRGSYILNQNEIAKIKETMFKNGAINADIVGKSAYIIAKMAGIEVPQTTKILIGEVQSVEKSELFSHEKLSPVLAMYKVKDFDEALKKAQRLIELGGSGHTSSLYIDSQNNKDKVKEFGLAMKTSRTFINMPSSQGASGDLYNFAIAPSFTLGCGTWGGNSVSQNVEPKHLLNIKSVAERREKRPWFKVPQKIYFKYGCLRFALKELKDMNKKRAFIVTDKDLFKLGYVNKITKVLDEIDIKYSIFTDIKSDPTIDSVKKGAKEMLNFEPDTIISIGGGSPMDAAKVMHLLYEYPEAEIENLAINFMDIRKRICNFPKLGTKAISVAIPTTAGTGSEATPFAVITNDETGMKYPLTSYELTPNMAIIDTELMLNMPRKLTAATGIDALVHAIEAYVSVMATDYTDELALRAIKMIFKYLPRAYKNGTNDIEAREKMAHASNIAGMAFANAFLGVCHSMAHKLGAMHHVPHGIACAVLIEEVIKYNATDCPTKQTAFPQYKSPNAKRKYAEIAEYLNLKGTSDTEKVTALIEAISKLKIDLSIPQNISAAGINKKDFYNTLDKMSELAFDDQCTTANPRYPLISELKDIYIKSF

SEQ ID NO: 61 - protein, 858 aa, Artificial Sequence
  Synthetic Construct
MKVTNQKELKQKDNELREAQKKFASYTQEQVDKIFKQCAIAAAKERINLAKLAVEETGIGLVEDKIIKNHFAAEYIYNKYKNGKTCGIIDHDDSLGITKVAEPIGIVAAIVPTTNPTSTAIFKSLISLKTRNAIFFSPHPRAKKSTIAAAKLILDAAVKAGAPKNIIGWIDEPSIELSQDLMSEADIILATGGPSMVKAAYSSGKPAIGVGAGNTPAIIDESADIDMAVSSIILSKTYDNGVICASEQSILVMNSIYEKVKEEFVKRGSYILNQNEIAKIKETMFKNGAINADIVGKSAYIIAKMAGIEVPQTTKILIGEVQSVEKSELFSHEKLSPVLAMYKVKDFDEALKKAQRLIELGGSGHTSSLYIDSQNNKDKVKEFGLAMKTSRTFINMPSSQGASGDLYNFAIAPSFTLGCGTWGGNSVSQNVEPKHLLNIKSVAERREKRPWFKVPQKIYFKYGCLRFALKELKDMNKKRAFIVTDKDLFKLGYVNKITKVLDEIDIKYSIFTDIKSDPTIDSVKKGAKEMLNFEPDTIISIGGGSPMDAAKVMHLLYEYPEAEIENLAINFMDIRKRICNFPKLGTKAISVAIPTTAGTGSEATPFAVITNDETGMKYPLTSYELTPNMAIIDTELMLNMPRKLTAATGIDALVHAIEAYVSVMATDYTDELALRAIKMIFKYLPRAYKNGTNDIEAREKMAHASNIAGMAFANAFLGVCHSMAHKLGAMHHVPHGIACAVLIEEVIKYNATDCPTKQTAFPQYKSPNAKRKYAEIAEYLNLKGTSDTEKVTALIEAISKLKIDLSIPQNISAAGINKKDFYNTLDKMSELAFDDQCTTANPRYPLISELKDIYIKSF

SEQ ID NO: 62 - protein, 858 aa, Artificial Sequence
  Synthetic Construct
MKVTNQKELKQKLNELREAQKKFATYTQEQVDKIFKQCAIAAAKERINLAKLAVEETGIGLVEDKIIKNHFAAEYIYNKYKNEKTCGIIDHDDSLGITKVAEPIGIVAAIVPTTNPTSTAIFKSLISLKTRNAIFFSPHPRAKKSTIAAAKLILDAAVKAGAPKNIIGWIDEPSIELSQDLMSEADIILATGGPSMVKAAYSSGKPAIGVGAGNTPAIIDESADIDMAVSSIILGKTYDNGVICASEQSILVMNSIYEKVKEEFVKRGSYILNQNEIAKIKETMFKNGAINADIVGKSAYIIAKMAGIEVPQYTKILIGEVQSVEKSELFSHEKLSPVLAMYKVKDFDEALKKAQRLIELGGSGHTSSLYIDSQNNKDKVKEFGLAMKTSRTFINMPSSQGASGDLYNFAIAPSFTLGCGTWEGNSVSQNVEPKHLLNIKSVAERREKRPWFKVPQKIYFKYGCLRFALKELKDMNKKRAFIVTDKDLFKLGYVNKITKVLDEIDIKYSIFTDIKSDPTIDSVKKGAKEMLNFEPDTIISIGGGSPMDAAKVMHLLYEYPEAEIENLAINFMDIRKRICNFPKLGTKAISVAIPTTAGTGSEATPFAVITNDETGMKYPLTSYELTPNMAIIDTELMLNMPRKLTAATGIDALVHAIEAYVSVMATDYTDELALRAIKMIFKYLPRAYKNGTNDIEAREKMAHASNIAGMAFANAFLGVCHSMAHKLGAMHHVPHGIACAVLIEEVIKYNATDCPTKQTAFPQYKSPNAKRKYAEIAEYLNLKGTSDTEKVTALIEAISKLKIDLSIPQNISAAGINKKDFYNTLDKMSELAFDDQCTTANPRYPLISELKDIYIKSF

SEQ ID NO: 63 - protein, 858 aa, Artificial Sequence
  Synthetic Construct
MKVTNQKELKQKLNELREAQKKFATYTQEQVDKIFKQCAIAAAKERINLAKLAVEETGIGLVEDKIIKNHFAAEYIYNKYKNEKTCGIIDHDDSLGITKVAEPIGIVAAIVPTTNPTSTAIFKSLISLATRNAIFFSPHPRAKKSTIAAAKLILDAAVKAGAPKNIIGWIDEPSIELSQDLMSEADIILATGGPSMVKAAYSSGKPAIGAGAGNTPAIIDESADIDMAVSSIILSKTYDNGVICASEQSILVMNSIYEKVKEEFVKRGSYILNQNAIAKIKETMFKNGAINADIVGKSAYIIAKMAGIEVPQTTKILIGEVQSVEKSELFSHEKLSPVLAMYKVKDFDEALKKAQRLIELGGSGHTSSLYIDSQNNKDKVKEFGLAMKTSRTFINMPSSQGASGDLYNFAIAPSFTLGCGTWGGNSVSQNVEPKHLLNIKSVAERREKRPWFKVPQKIYFKYGCLRFALKELKDMNKKRAFIVTDKDLFKLGYVNKITKVLDEIDIKYSIFTDIKSDPTIDSVKKGAKEMLNFEPDTIISIGGGSPMDAAKVMHLLYEYPEAEIENLAINFMDIRKRICNFPKLGTKAISVAIPTTAGTGSEATPFAVITNDETGMKYPLTSYELTPNMAIIDTELMLNMPRKLTAATGIDALVHAIEAYVSVMATDYTDELALRAIKMIFKYLPRAYKNGTNDIEAREKMAHASNIAGMAFANAFLGVCHSMAHKLGAMHHVPHGIACAVLIEEVIKYNATDCPTKQTAFPQYKSPNAKRKYAEIAEYLNLKGTSDTEKVTALIEAISKLKIDLSIPQNISAAGINKKDFYNTLDKMSELAFDDQCTTANPRYPLISELKDIYIKSF

SEQ ID NO: 64 - protein, 858 aa, Artificial Sequence
  Synthetic Construct
MKVTNQKELKQKLNELREAQKKFACYTQDQVDKIFKQCAIAAAKERINLAELAVEETGIGLVEDKIIKNHFAAEYIYNKYKNEKTCGIIDHDDSLGITKVAEPIGIVAAIVPTTNPTSTAIFKSLISLKTRNAIFFSPHPRAKKSTIAAAKLILDAAVKAGAPKNIIGWIDEPSIELSQDLMSEADIILATGGPSMVKAAYSSGKPAIGVGAGNTPAIIDESADIDMAVSSIILSKTYDNGVICASEQSILVMNSIYEKVKEEFVKRGSYILNQNEIAKIKETMFKNGAINADIVGKSAYIIAKMAGIEVPQTTKILIGEVQSVEKSELFSHEKLSPVLAMYKVKDFDEALKKAQRLIELGGSGHTSSLYIDSQNNKDKVKEFGLAMKTSRTFINMPSSQGASGDLYNFAIAPSFTLGCGTWGGNSVSQNVEPKHLLNIKSVAERREKRPWFKVPQKIYFKYGCLRFALKELKDMNKKRAFIVTDKDLFKLGYVNKITKVLDEIDIKYSIFTDIKSDPTIDSVKKGAKEMLNFEPDTIISIGGGSPMDAAKVMHLLYEYPEAEIENLAINFMDIRKRICNFPKLGTKAISVAIPTTAGTGSEATPFAVITNDETGMKYPLTSYELTPNMAIIDTELMLNMPRKLTAATGIDALVHAIEAYVSVMATDYTDELALRAIKMIFKYLPRAYKNGTNDIEAREKMAHASNIAGMAFANAFLGVCHSMAHKLGAMHHVPHGIACAVLIEEVIKYNATDCPTKQTAFPQYKSPNAKRKYAEIAEYLNLKGTSDTEKVTALIEAISKLKIDLSIPQNISAAGINKKDFYNTLDKMSELAFDDQCTTANPRYPLISELKDIYIKSF

SEQ ID NO: 65 - protein, 858 aa, Artificial Sequence
  Synthetic Construct
MKVTNQKELKQKLNELREAQKKFATYTQEQVDKFFKQCAIAAAKERINLAKLAVEETGIGLVEDKIIKNHFAAEYIYNKYKNEKTCGIIDHDDSLGITKVAEPIGIVAAIVPTTNPTSTAIFKSLISLKTRNAIFFSPHPRAKKSTIAAAKLILDAAVKAGAPKNIIGWIDEPSIELSQDLMSEADIILATGGPSMVKAAYSSGKPAIGVGAGNTPAIIDESADIDMAVSSIILSKTYDNGVICASEQSILVMNSIYEKVKEEFVKRGSYILNQNEIAKIKETMFKNGAINADIVGKSAYIIAKMAGIEVPQTTKILIGEVQSVEKSELFSHEKLSPVLAMYKVKDFDEALKKAQRLIELGGSGHTSSLYIDSQNNKDKVKEFGLEMKTSRFFINMPSSQGASGDLYNFAIAPSFTLGCGTWGGNSVSQNVEPKHLLNIKSVAERREKRPWFKVPQKIYFKYGCLRFALKELKDMNKKRAFIVTDKDLFKLGYVNKITKVLDEIDIKYSIFTDIKSDPTIDSVKKGAKEMLNFEPDTIISIGGGSPMDAAKVMHLLYEYPEAEIENLAINFMDIRKRICNFPKLGTKAISVAIPTTAGTGSEATPFAVITNDETGMKYPLTSYELTPNMAIIDTELMLNMPRKLTAATGIDALVHAIEAYVSVMATDYTDELALRAIKMIFKYLPRAYKNGTNDIEAREKMAHASNIAGMAFANAFLGVCHSMAHKLGAMHHVPHGIACAVLIEEVIKYNATDCPTKQTAFPQYKSPNAKRKYAEIAEYLNLKGTSDTEKVTALIEAISKLKIDLSIPQNISAAGINKKDFYNTLDKMSELAFDDQCTTANPRYPLISELKDIYIKSF

SEQ ID NO: 66 - protein, 858 aa, Artificial Sequence
  Synthetic Construct
MKVTNQKELKQKLNELREAQKKFATYTQEQVDKIFKQCAIAAAKERINLAKLAVEETGIGLVEDKIIKNHFAAEYIYNKYKNEKTCGIIDHDDSLGITKVAEPIGIVAAIVPTTNPTSTAIFKSLISLKTRNAIFFSPHPRAKKSTIAAAKLILDAAVKAGAPKNIIGWIDEPSIELSQDLMSEADIILATGGPSMVKAAYSSGKPAIGVGAGNTPAIIDESADIDMAVSSIILSKTYDNGVICASEQSILVMNSIYEKVKAEFVKRGSYILNQEEIAKIKETMFKNGAINADIVGKSAYIIAKMAGIEVPQTTKILIGEVQSVEKSELFSHEKLSPVLAMYKVKDFDEALKLAQRLIELGGSGHTSSLYIDSQNNKDKVKEFGLAMKTSRTFINMPSSQGASGDLYNFAIAPSFTLGCGTWGGNSVSQNVEPKHLLNIKSVAERREKRPWFKVPQKIYFKYGCLRFALKELKDMNKKRAFIVTDKDLFKLGYVNKITKVLDEIDIKYSIFTDIKSDPTIDSVKKGAKEMLNFEPDTIISIGGGSPMDAAKVMHLLYEYPEAEIENLAINFMDIRKRICNFPKLGTKAISVAIPTTAGTGSEATPFAVITNDETGMKYPLTSYELTPNMAIIDTELMLNMPRKLTAATGIDALVHAIEAYVSVMATDYTDELALRAIKMIFKYLPRAYKNGTNDIEAREKMAHASNIAGMAFANAFLGVCHSMAHKLGAMHHVPHGIACAVLIEEVIKYNATDCPTKQTAFPQYKSPNAKRKYAEIAEYLNLKGTSDTEKVTALIEAISKLKIDLSIPQNISAAGINKKDFYNTLDKMSELAFDDQCTTANPRYPLISELKDIYIKSF

SEQ ID NO: 67 - protein, 858 aa, Artificial Sequence
  Synthetic Construct
MKVTNQKELKQKLNELREAQKKFATYTQEQVDKIFKQCAIAAAKERINLAKLAVEETGIGLVEDKIIKNHFAAEYIYNKYKNEKTCGIIDHDDSLGITKVAEPIGIVAAIVPTTNPTSTAIFKSLISLKTRNAIFFSPHPRAKKSTIAAAKLILDAAVKAGAPKNIIGWIDEPSIELSQDLMSEADIILATGGPSMVKAAYSSGKPAIGVGAGNTPAIIDESADIDMAVSSIILSKTYDNGVICASEQSILVMNSIYEKVKEEFVKRGSYILNQNEIAKIKETMFKNGAINADIVGKSAYIIAKMAGIEVPQYTKILIGEVQHVEKSELFSHEKLSPVLAMYKVKDFDEALKKAQRLIELGGSGHTSSLYIDSQNNKDKVKEFGLAMKTSRTFINMPSSQGASGDLYNFAIAPSFTLGCPTWGGNSVSQNVEPKHLLNIKSVAERREKRPWFKVPQKIYFKYGCLRFALKELKDMNKKRAFIVTDKDLFKLGYVNKITKVLDEIDIKYSIFTDIKSDPTIDSVKKGAKEMLNFEPDTIISIGGGSPMDAAKVMHLLYEYPEAEIENLAINFMDIRKRICNFPKLGTKAISVAIPTTAGTGSEATPFAVITNDETGMKYPLTSYELTPNMAIIDTELMLNMPRKLTAATGIDALVHAIEAYVSVMATDYTDELALRAIKMIFKYLPRAYKNGTNDIEAREKMAHASNIAGMAFANAFLGVCHSMAHKLGAMHHVPHGIACAVLIEEVIKYNATDCPTKQTAFPQYKSPNAKRKYAEIAEYLNLKGTSDTEKVTALIEAISKLKIDLSIPQNISAAGINKKDFYNTLDKMSELAFDDQCTTANPRYPLISELKDIYIKSF

SEQ ID NO: 68 - protein, 858 aa, Artificial Sequence
  Synthetic Construct
MKVTNQKELKQKLNELREAQKKFLTYTQEQVDKIFKQCAIAAAKERINLAKLAVEETGIGLVEDKIIKNHFAAEYIYNKYKNEKTCGIIDHDDSLGITKVAEPIGIVAAIVPTTNPTSTAIFKSLISLKTRNAIFFSPHPRAKKSTIAAAKLILDAAVKAGAPKNIIGWIDEPSIELSQDLMSEADIILATGGPSMVKAAYSSGKPAIGVGAGNTPAIIDESADIDMAVSSIILSKTYDNGVICASEQSILVMNSIYEKVKEEFVKRGSYILNQNEIAKIKETMFKNGAINADIVGKSAYIIAKMAGIEVPQTTKILIGEVQSVEKSELFSHELLSPVLAMYKVKDFDEALKKAQRLINLGGSGHTSSLYIDSQNNKDKVKEFGLAMKTSRTFINMPSSQGASGDLYNFAIAPSFTLGCGTWGGNSVSQNVEPKHLLNIKSVAERREKRPWFKVPQKIYFKYGCLRFALKELKDMNKKRAFIVTDKDLFKLGYVNKITKVLDEIDIKYSIFTDIKSDPTIDSVKKGAKEMLNFEPDTIISIGGGSPMDAAKVMHLLYEYPEAEIENLAINFMDIRKRICNFPKLGTKAISVAIPTTAGTGSEATPFAVITNDETGMKYPLTSYELTPNMAIIDTELMLNMPRKLTAATGIDALVHAIEAYVSVMATDYTDELALRAIKMIFKYLPRAYKNGTNDIEAREKMAHASNIAGMAFANAFLGVCHSMAHKLGAMHHVPHGIACAVLIEEVIKYNATDCPTKQTAFPQYKSPNAKRKYAEIAEYLNLKGTSDTEKVTALIEAISKLKIDLSIPQNISAAGINKKDFYNTLDKMSELAFDDQCTTANPRYPLISELKDIYIKSF

SEQ ID NO: 69 - protein, 858 aa, Artificial Sequence
  Synthetic Construct
MKVTNQKELKQKLNELREAQKKFATYTQDQVDKIFKQCAIAAAKERINLAKLAVEETGIGLVEDKIIKNHFAAEYIYNKYKNEKTCGIIDHDDSLGITKVAEPIGIVAAIVPTTNPTSTAIFKSLISLKTRNAIFFSPHPRAKKSTIAAATLILDAAVKAGAPKNIIGWIDEPSIELSQDLMSEADIILATGGPSMVKAAYSSGKPAIGVGAGNTPAIIDESADIDMAVSSIILSKTYDNGVICASEQSILVMNSIYEKVKEEFVKRGSYILNQQEIAKIKETMFKNGAINADIVGKSAYIIAKMAGIEVPQTTKILIGEVQSVEKSELFSHEKLSPVLAMYKVKDFDEALKKAQRLIELGGSGHTSSLYIDSQNNKDKVKEFGLAMKTSRTFINMPSSQGASGDLYNFAIAPSFTLGCGTWGGNSVSQNVEPKHLLNIKSVAERREKRPWFKVPQKIYFKYGCLRFALKELKDMNKKRAFIVTDKDLFKLGYVNKITKVLDEIDIKYSIFTDIKSDPTIDSVKKGAKEMLNFEPDTIISIGGGSPMDAAKVMHLLYEYPEAEIENLAINFMDIRKRICNFPKLGTKAISVAIPTTAGTGSEATPFAVITNDETGMKYPLTSYELTPNMAIIDTELMLNMPRKLTAATGIDALVHAIEAYVSVMATDYTDELALRAIKMIFKYLPRAYKNGTNDIEAREKMAHASNIAGMAFANAFLGVCHSMAHKLGAMHHVPHGIACAVLIEEVIKYNATDCPTKQTAFPQYKSPNAKRKYAEIAEYLNLKGTSDTEKVTALIEAISKLKIDLSIPQNISAAGINKKDFYNTLDKMSELAFDDQCTTANPRYPLISELKDIYIKSF

SEQ ID NO: 70 - protein, 858 aa, Artificial Sequence
  Synthetic Construct
MKVTNQKELKQKLNELREAQKKFASYTQEQVDKIFKQCAIAAAKERINLAKLAVEETGIGLVEDKIIKNHFAAEYIYNKYKNEKTCGIIDHDDSLGITKVAEPIGIVASIVPTTNPTSTAIFKSLISLKTRNAIFFSPHPRAKKSTIAAAKLILDAAVKAGAPKNIIGWIDEPSIELSQDLMSEADIILATGGPSMVKAAYSSGKPAIGVGAGNTPAIIDESADIDMAVSSIILGKTYDNGVICASEQSILVMNSIYEKVKEEFVKRGSYILNQNEIAKIKETMFKNGAINADIVGKSAYIIAKMAGIEVPQTTKILIGEVQSVEKSELFSHEKLSPVLAMYKVKDFDEALKKAQRLIELGGSGHTSSLYIDSQNNKDKVKEFGLAMKTSRTFINMPSSQGASGDLYNFAIAPSFTLGCGTWGGNSVSQNVEPKHLLNIKSVAERREKRPWFKVPQKIYFKYGCLRFALKELKDMNKKRAFIVTDKDLFKLGYVNKITKVLDEIDIKYSIFTDIKSDPTIDSVKKGAKEMLNFEPDTIISIGGGSPMDAAKVMHLLYEYPEAEIENLAINFMDIRKRICNFPKLGTKAISVAIPTTAGTGSEATPFAVITNDETGMKYPLTSYELTPNMAIIDTELMLNMPRKLTAATGIDALVHAIEAYVSVMATDYTDELALRAIKMIFKYLPRAYKNGTNDIEAREKMAHASNIAGMAFANAFLGVCHSMAHKLGAMHHVPHGIACAVLIEEVIKYNATDCPTKQTAFPQYKSPNAKRKYAEIAEYLNLKGTSDTEKVTALIEAISKLKIDLSIPQNISAAGINKKDFYNTLDKMSELAFDDQCTTANPRYPLISELKDIYIKSF

SEQ ID NO: 71 - protein, 858 aa, Artificial Sequence
  Synthetic Construct
MKVTNQKELKQKLNELREAQKKFASYTQEQVDKIFKQCAIAAAKERINLAKLAVEETGIGLVEDKIIKNHFAAEYIYNKYKNEKTCGIIDHDDSLGITKVAEPIGIVAAIVPTTNPTSTAIFKSLISLKTRNAIFFSPHPRAKKSTIAAAKLILDAAVKAGAPKNIIGWIDEPSIELSQDLMSEADIILATGGPSMVKAAYSSGKPAIGVGAGNTPAIIDESADIDMAVSSIILSKTYDNGVICASEQSILVMNSIYEKVKEEFVKRGSYILNQNEIAKIKETMFKNGAINRDIVGKSAYIIAKMAGIEVPQTTKILIGEVQSVEKSELFSKEKLSPVLAMYKVKDFDEALKKAQRLIELGGSGHTSSLYIDSQNNKDKVKEFGLAMKTSRTFINMPSSQGASGDLYNFAIAPSFTLGCGTWGGNSVSQNVEPKHLLNIKSVAERREKRPWFKVPQKIYFKYGCLRFALKELKDMNKKRAFIVTDKDLFKLGYVNKITKVLDEIDIKYSIFTDIKSDPTIDSVKKGAKEMLNFEPDTIISIGGGSPMDAAKVMHLLYEYPEAEIENLAINFMDIRKRICNFPKLGTKAISVAIPTTAGTGSEATPFAVITNDETGMKYPLTSYELTPNMAIIDTELMLNMPRKLTAATGIDALVHAIEAYVSVMATDYTDELALRAIKMIFKYLPRAYKNGTNDIEAREKMAHASNIAGMAFANAFLGVCHSMAHKLGAMHHVPHGIACAVLIEEVIKYNATDCPTKQTAFPQYKSPNAKRKYAEIAEYLNLKGTSDTEKVTALIEAISKLKIDLSIPQNISAAGINKKDFYNTLDKMSELAFDDQCTTANPRYPLISELKDIYIKSF

SEQ ID NO: 72 - protein, 858 aa, Artificial Sequence
  Synthetic Construct
MKVTNQKELKQKDNELREAQKKFATYTQEQVDKIFKQCAIAAAKERINLAKLAVEETGIGLVEDKIIKNHFAAEYIYNKYKNEKTCGIIDHDDSLGITKVAEPIGIVAAIVPTTNPTSTAIFKSLISLKTRNAIFFSPHPRAKKSTIAAAKLILDAAVKAGAPKNIIGWIDEPSIELSQDLMSEADIILATGGPSMVKAAYSSGKPAIGVGAGNTPAIIDESADIDMAVSSIILSKTYDNGVICASEQSILVMNSIYEKVKEEFVKRGSYILNQNEIAKIKETMFKNGAINADIVGKSAYIIAKMAGIEVPQTTKILIGEVQSVEKSELFSHEKLSPVLAMYKVKDFDEALKKAQRLIELGGSGHTSSLYSDSQNNKDKVKEFGLEMKTSRTFINMPSSQGASGDLYNFAIAPSFTLGCGTWGGNSVSQNVEPKHLLNIKSVAERREKRPWFKVPQKIYFKYGCLRFALKELKDMNKKRAFIVTDKDLFKLGYVNKITKVLDEIDIKYSIFTDIKSDPTIDSVKKGAKEMLNFEPDTIISIGGGSPMDAAKVMHLLYEYPEAEIENLAINFMDIRKRICNFPKLGTKAISVAIPTTAGTGSEATPFAVITNDETGMKYPLTSYELTPNMAIIDTELMLNMPRKLTAATGIDALVHAIEAYVSVMATDYTDELALRAIKMIFKYLPRAYKNGTNDIEAREKMAHASNIAGMAFANAFLGVCHSMAHKLGAMHHVPHGIACAVLIEEVIKYNATDCPTKQTAFPQYKSPNAKRKYAEIAEYLNLKGTSDTEKVTALIEAISKLKIDLSIPQNISAAGINKKDFYNTLDKMSELAFDDQCTTANPRYPLISELKDIYIKSF

SEQ ID NO: 73 - protein, 858 aa, Artificial Sequence
  Synthetic Construct
MKVTNQKELKQKLNELREAQKKFATYTQEQVDKFFKQCAIAAAKYRINLAKLAVEETGIGLVEDKIIKNHFAAEYIYNKEKNEKTCGIIDHDDSLGITKVAEPIGIVAAIVPTTNPTSTAIFKSLISLKTRNAIFFSPHPRAKKSTIAAAKLILDAAVKAGAPKNIIGWIDEPSIELSQDLMSEADIILATGGPSMVKAAYSSGKPAIGVGAGNTPAIIDESADIDMAVSSIILSKTYDNGVICASEQSILVMNSIYEKVKEEFVKRGSYILNQNEIAKIKETMFKNGAINADIVGKSAYIIAKMAGIEVPQTTKILIGEVQSVEKSELFSHEKLSPVLAMYKVKDFDEALKKAQRLIELGGSGHTSSLYIDSQNNKDKVKEFGLAMKTSRTFINMPSSQGASGDLYNFAIAPSFTLGCGTWGGNSVSQNVEPKHLLNIKSVAERREKRPWFKVPQKIYFKYGCLRFALKELKDMNKKRAFIVTDKDLFKLGYVNKITKVLDEIDIKYSIFTDIKSDPTIDSVKKGAKEMLNFEPDTIISIGGGSPMDAAKVMHLLYEYPEAEIENLAINFMDIRKRICNFPKLGTKAISVAIPTTAGTGSEATPFAVITNDETGMKYPLTSYELTPNMAIIDTELMLNMPRKLTAATGIDALVHAIEAYVSVMATDYTDELALRAIKMIFKYLPRAYKNGTNDIEAREKMAHASNIAGMAFANAFLGVCHSMAHKLGAMHHVPHGIACAVLIEEVIKYNATDCPTKQTAFPQYKSPNAKRKYAEIAEYLNLKGTSDTEKVTALIEAISKLKIDLSIPQNISAAGINKKDFYNTLDKMSELAFDDQCTTANPRYPLISELKDIYIKSF

SEQ ID NO: 74 - protein, 858 aa, Artificial Sequence
  Synthetic Construct
MKVTNQKELKQKLNELREAQKKFATYTQEQVEKIFKQCAIAAAKERINLAKLAVEETGIGLVEDKIIKNHFAAEYIYNKYKNEKTCGIIDHDDSLGITKVAEPIGIVAAIVPTTNPTSTAIFKSLISLKTRNAIFFSPHPRAKKSTIAAAKLILDAAVKAGAPKNIIGWIDEPSIELSQDLMSEPDIILATGGPSMVKAAYSSGKPAIGVGAGNTPAIIDESADIDMAVSSIILSKTYDNGVICASEQSILVMNSIYEKVKEEFVKRGSYILNQNEIAKIKETMFKNGAINADIVGKSAYIIAKMAGIEVPQTTKILIGEVQSVEKSELFSKEKLSPVLAMYKVKDFDEALKKAQRLIELGGSGHTSSLYIDSQNNKDKVKEFGLAMKTSRTFINMPSSQGASGDLYNFAIAPSFTLGCGTWGGNSVSQNVEPKHLLNIKSVAERREKRPWFKVPQKIYFKYGCLRFALKELKDMNKKRAFIVTDKDLFKLGYVNKITKVLDEIDIKYSIFTDIKSDPTIDSVKKGAKEMLNFEPDTIISIGGGSPMDAAKVMHLLYEYPEAEIENLAINFMDIRKRICNFPKLGTKAISVAIPTTAGTGSEATPFAVITNDETGMKYPLTSYELTPNMAIIDTELMLNMPRKLTAATGIDALVHAIEAYVSVMATDYTDELALRAIKMIFKYLPRAYKNGTNDIEAREKMAHASNIAGMAFANAFLGVCHSMAHKLGAMHHVPHGIACAVLIEEVIKYNATDCPTKQTAFPQYKSPNAKRKYAEIAEYLNLKGTSDTEKVTALIEAISKLKIDLSIPQNISAAGINKKDFYNTLDKMSELAFDDQCTTANPRYPLISELKDIYIKSF

SEQ ID NO: 75 - protein, 858 aa, Artificial Sequence
  Synthetic Construct
MKVTNQKELKQKLNELREAQKKFATYTQEQVDKIFKQCAIAAAKLRINLAKLAVEETGIGLVEDKIIKNHFAAEYIYNKYKNEKTCGIIDHDDSLGITKVAEPIGIVAAIVPTTNPTSTAIFKSLISLKTRNAIFFSPHPRAKKSTIAAAKLILDAAVKAGAPKNIIGWIDEPSIELSQDLMSEADIILATGGPSMVKAAYSSGKPAIGVGAGNTPAIIDESADIDMAVSSIILSKTYDNGVICASEQSILVMNSIYEKVKEEFVKRGSYILNQNEIAKIKETMFKNGAINADIVGKSAYIIAKMAGIEVPQTTKILIGEVQSVEKSELFSEELLSPVLAMYKVKDFDEALKKAQRLIELGGSGHTSSLYIDSQNNKDKVKEFGLAMKTSRTFINMPSSQGASGDLYNFAIAPSFTLGCGTWGGNSVSQNVEPKHLLNIKSVAERREKRPWFKVPQKIYFKYGCLRFALKELKDMNKKRAFIVTDKDLFKLGYVNKITKVLDEIDIKYSIFTDIKSDPTIDSVKKGAKEMLNFEPDTIISIGGGSPMDAAKVMHLLYEYPEAEIENLAINFMDIRKRICNFPKLGTKAISVAIPTTAGTGSEATPFAVITNDETGMKYPLTSYELTPNMAIIDTELMLNMPRKLTAATGIDALVHAIEAYVSVMATDYTDELALRAIKMIFKYLPRAYKNGTNDIEAREKMAHASNIAGMAFANAFLGVCHSMAHKLGAMHHVPHGIACAVLIEEVIKYNATDCPTKQTAFPQYKSPNAKRKYAEIAEYLNLKGTSDTEKVTALIEAISKLKIDLSIPQNISAAGINKKDFYNTLDKMSELAFDDQCTTANPRYPLISELKDIYIKSF

SEQ ID NO: 76 - protein, 858 aa, Artificial Sequence
  Synthetic Construct
MKVTNQKELKQKLNELREAQKKFATYTQEQVDKIFKQCAIAAAKERINLAKLAVEETGIGLVEDKIIKNHFAAEYIYNKYKNHKTCGIIDHDDSLGITKVAEPIGIVAAIVPTTNPTSTAIFKSLISLATRNAIFFSPHPRAKKSTIAAAKLILDAAVKAGAPKNIIGWIDEPSIELSQDLMSEADIILATGGPSMVKAAYSSGKPAIGVGAGNTPAIIDESADIDMAVSSIILSKTYDNGVICASEQSILVMNSIYEKVKEEFVKRGSYILNQNEIAKIKETMFKNGAINADIVGKSAYIIAKMAGIEVPQTTKILIGEVQSVEKSELFSHEKLSPVLAMYKVKDFDEALDKAQRLIELGGSGHTSSLYIDSQNNKDKVKEFGLAMKTSRTFINMPSSQGASGDLYNFAIAPSFTLGCGTWGGNSVSQNVEPKHLLNIKSVAERREKRPWFKVPQKIYFKYGCLRFALKELKDMNKKRAFIVTDKDLFKLGYVNKITKVLDEIDIKYSIFTDIKSDPTIDSVKKGAKEMLNFEPDTIISIGGGSPMDAAKVMHLLYEYPEAEIENLAINFMDIRKRICNFPKLGTKAISVAIPTTAGTGSEATPFAVITNDETGMKYPLTSYELTPNMAIIDTELMLNMPRKLTAATGIDALVHAIEAYVSVMATDYTDELALRAIKMIFKYLPRAYKNGTNDIEAREKMAHASNIAGMAFANAFLGVCHSMAHKLGAMHHVPHGIACAVLIEEVIKYNATDCPTKQTAFPQYKSPNAKRKYAEIAEYLNLKGTSDTEKVTALIEAISKLKIDLSIPQNISAAGINKKDFYNTLDKMSELAFDDQCTTANPRYPLISELKDIYIKSF

SEQ ID NO: 77 - protein, 858 aa, Artificial Sequence
  Synthetic Construct
MKVTNQKELKQKLNELREAQKKFATYTQEQVDKIFKQCAIAAAKERINLAKLAVEETGIGLVEDKIIKNHFAAEYIYNKEKNEKTCGIIDHDDSLGITKVAEPIGIVAAIVPTTNPTSTAIFKSLISLKTRNAIFFSPHPRAKKSTIAAAKLILDAAVKAGAPKNIIGWIDEPSIELSQDLMSEADIILATGGPSMVKAAYSSGKPAIGVGAGNTPAIIDESADIDMAVSSIILSKTYDNGVICASEQSILVMNSIYEKVKEEFVKRGSYILNQNEIAKIKETMFKNGAINADIVGKSAYIIAKMAGIEVPQTTKILIGEVQSVEKSELFSHEKLSPVLAMYKVKDFDEALKKAQRLIELGGSGHTSSLYIDSQNNKDKVKEFGLAMKTSRTFINMPSSQGASGDLYNFAIAPSFTLGCGTWGGNSVSQNVEPKHLLNIVSVARRREKRPWFKVPQKIYFKYGCLRFALKELKDMNKKRAFIVTDKDLFKLGYVNKITKVLDEIDIKYSIFTDIKSDPTIDSVKKGAKEMLNFEPDTIISIGGGSPMDAAKVMHLLYEYPEAEIENLAINFMDIRKRICNFPKLGTKAISVAIPTTAGTGSEATPFAVITNDETGMKYPLTSYELTPNMAIIDTELMLNMPRKLTAATGIDALVHAIEAYVSVMATDYTDELALRAIKMIFKYLPRAYKNGTNDIEAREKMAHASNIAGMAFANAFLGVCHSMAHKLGAMHHVPHGIACAVLIEEVIKYNATDCPTKQTAFPQYKSPNAKRKYAEIAEYLNLKGTSDTEKVTALIEAISKLKIDLSIPQNISAAGINKKDFYNTLDKMSELAFDDQCTTANPRYPLISELKDIYIKSF

SEQ ID NO: 78 - protein, 858 aa, Artificial Sequence
  Synthetic Construct
MKVTNQKELKQKLNELREAQKKFATYTQEQVDKIFKQCAIAAAKERINLAKLAVEETGIGLVEDKIIKNHFAAEYIYNKYKNEKTCGIIDHDDSLGITKVAEPIGIVAAIVPTTNPTSTAIFKSLISLKTRNAIFFSPHPRAKKSTIAAAKLILDAAVKAGAPKNIIGWIDEPSIELSQDLMSEADIILATGGPSMVKAAYSSGKPAIGAGAGNTPAIIDESADIDMAVSSIILSKTYDNGVICASEQSILVMNSIYEKVKEEFVKRGSYILNQNEIAKIKETMFKNGAINADIVGKSAYIIAKMAGIEVPQTTKILIGEVQDVEKSELFSVEKLSPVLAMYKVKDFDEALKKAQRLIELGGSGHTSSLYIDSQNNKDKVKEFGLAMKTSRTFINMPSSQGASGDLYNFAIAPSFTLGCGTWGGNSVSQNVEPKHLLNIKSVAERREKRPWFKVPQKIYFKYGCLRFALKELKDMNKKRAFIVTDKDLFKLGYVNKITKVLDEIDIKYSIFTDIKSDPTIDSVKKGAKEMLNFEPDTIISIGGGSPMDAAKVMHLLYEYPEAEIENLAINFMDIRKRICNFPKLGTKAISVAIPTTAGTGSEATPFAVITNDETGMKYPLTSYELTPNMAIIDTELMLNMPRKLTAATGIDALVHAIEAYVSVMATDYTDELALRAIKMIFKYLPRAYKNGTNDIEAREKMAHASNIAGMAFANAFLGVCHSMAHKLGAMHHVPHGIACAVLIEEVIKYNATDCPTKQTAFPQYKSPNAKRKYAEIAEYLNLKGTSDTEKVTALIEAISKLKIDLSIPQNISAAGINKKDFYNTLDKMSELAFDDQCTTANPRYPLISELKDIYIKSF

SEQ ID NO: 79 - protein, 858 aa, Artificial Sequence
  Synthetic Construct
MKVTNQKELKQKLNELREAQKKFATYTQDQVDKIFKQCAIAAAKERINLAKLAVEETGIGLVEDKIIKNHFAAEYIYNKYKNEKTCGIIDHDDSLGITKVAEPIGIVAAIVPTTNPTSTAIFKSLISLKTRNAIFFSPHPRAKKSTIAAAKLILDAAVKAGAPKNIIGWIDEPSIELSQDLMKEADIILATGGPSMVKAAYSSGKPAIGVGAGNTPAIIDESADIDMAVSSIILSKTYDNGVICASEQSILVMNSIYEKVKKEFVKRGSYILNQNEIAKIKETMFKNGAINADIVGKSAYIIAKMAGIEVPQTTKILIGEVQSVEKSELFSHEKLSPVLAMYKVKDFDEALKKAQRLIELGGSGHTSSLYIDSQNNKDKVKEFGLAMKTSRTFINMPSSQGASGDLYNFAIAPSFTLGCGTWGGNSVSQNVEPKHLLNIKSVAERREKRPWFKVPQKIYFKYGCLRFALKELKDMNKKRAFIVTDKDLFKLGYVNKITKVLDEIDIKYSIFTDIKSDPTIDSVKKGAKEMLNFEPDTIISIGGGSPMDAAKVMHLLYEYPEAEIENLAINFMDIRKRICNFPKLGTKAISVAIPTTAGTGSEATPFAVITNDETGMKYPLTSYELTPNMAIIDTELMLNMPRKLTAATGIDALVHAIEAYVSVMATDYTDELALRAIKMIFKYLPRAYKNGTNDIEAREKMAHASNIAGMAFANAFLGVCHSMAHKLGAMHHVPHGIACAVLIEEVIKYNATDCPTKQTAFPQYKSPNAKRKYAEIAEYLNLKGTSDTEKVTALIEAISKLKIDLSIPQNISAAGINKKDFYNTLDKMSELAFDDQCTTANPRYPLISELKDIYIKSF

SEQ ID NO: 80 - protein, 858 aa, Artificial Sequence
  Synthetic Construct
MKVTNQKELKQKLNELREAQKKFATYTQEQVDKFFKQCAIAAAKERINLARLAVEETGIGLVEDKIIKNHFAAEYIYNKYKNEKTCGIIDHDDSLGITKVAEPIGIVAAIVPTTNPTSTAIFKSLISLKTRNAIFFSPHPRAKKSTIAAAKLILDAAVKAGAPKNIIGWIDEPSIELSQDLMSEADIILATGGPSMVKAAYSSGKPAIGVGAGNTPAIIDESADIDMAVSSIILSKTYDNGVICASEQSILVMNSIYEKVKEEFVKRGSYILNQNEIAKIKETMFKNGAINADIVGKSAYIIAKMAGIEVPQTTKILIGEVQSVEASELFSHEKLSPVLAMYKVKDFDEALKKAQRLIELGGSGHTSSLYIDSQNNKDKVKEFGLAMKTSRTFINMPSSQGASGDLYNFAIAPSFTLGCGTWGGNSVSQNVEPKHLLNIKSVAERREKRPWFKVPQKIYFKYGCLRFALKELKDMNKKRAFIVTDKDLFKLGYVNKITKVLDEIDIKYSIFTDIKSDPTIDSVKKGAKEMLNFEPDTIISIGGGSPMDAAKVMHLLYEYPEAEIENLAINFMDIRKRICNFPKLGTKAISVAIPTTAGTGSEATPFAVITNDETGMKYPLTSYELTPNMAIIDTELMLNMPRKLTAATGIDALVHAIEAYVSVMATDYTDELALRAIKMIFKYLPRAYKNGTNDIEAREKMAHASNIAGMAFANAFLGVCHSMAHKLGAMHHVPHGIACAVLIEEVIKYNATDCPTKQTAFPQYKSPNAKRKYAEIAEYLNLKGTSDTEKVTALIEAISKLKIDLSIPQNISAAGINKKDFYNTLDKMSELAFDDQCTTANPRYPLISELKDIYIKSF

SEQ ID NO: 81 - protein, 858 aa, Artificial Sequence
  Synthetic Construct
MKVTNQKELKQKLNELREAQKKFATCTQEQVDKIFKQCAIAAAKERINLAKLAVEETGIGLVEDKIIKNHFAAEYIYNKYKNEKTCGIIDHDDSLGITKVAEPIGIVAAIVPTTNPTSTAIFKSLISLKTRNAIFFSPHPRAKKSTIAAAKLILDAAVKAGAPKNIIGWIDEPSIELSQDLMSEADIILATGGPSMVKAAYSSGKPAIGVGAGNTPAIIDESADIDMAVSSIILSATYDNGVICASEQSILVMNSIYEKVKEEFVKRGSYILNQNEIAKIKETMFKNGAINRDIVGKSAYIIAKMAGIEVPQTTKILIGEVQSVEKSELFSHEKLSPVLAMYKVKDFDEALKKAQRLIELGGSGHTSSLYIDSQNNKDKVKEFGLAMKTSRTFINMPSSQGASGDLYNFAIAPSFTLGCGTWGGNSVSQNVEPKHLLNIKSVAERREKRPWFKVPQKIYFKYGCLRFALKELKDMNKKRAFIVTDKDLFKLGYVNKITKVLDEIDIKYSIFTDIKSDPTIDSVKKGAKEMLNFEPDTIISIGGGSPMDAAKVMHLLYEYPEAEIENLAINFMDIRKRICNFPKLGTKAISVAIPTTAGTGSEATPFAVITNDETGMKYPLTSYELTPNMAIIDTELMLNMPRKLTAATGIDALVHAIEAYVSVMATDYTDELALRAIKMIFKYLPRAYKNGTNDIEAREKMAHASNIAGMAFANAFLGVCHSMAHKLGAMHHVPHGIACAVLIEEVIKYNATDCPTKQTAFPQYKSPNAKRKYAEIAEYLNLKGTSDTEKVTALIEAISKLKIDLSIPQNISAAGINKKDFYNTLDKMSELAFDDQCTTANPRYPLISELKDIYIKSF

SEQ ID NO: 82 - protein, 858 aa, Artificial Sequence
  Synthetic Construct
MKVTNQKELKQKLNELREAQKKFNTYTQEQVDKIFKQCAIAAAKERINLAKLAVEETGIGLVEDKIIKNHFAAEYIYNKYKNEKTCGIIDHDDSLGITKVAEPIGIVAAIVPTTNPTSTAIFKSLISLKTRNAIFFSPHPRAKKSTIAAAKLILDAAVKAGAPKNIIGWIDEPSIELSQDLMSEADIILATGGPSMVKAAYSSGKPAIGVGAGNTPAIIDESADIDMAVSSIILSATYDNGVICASEQSILVMNSIYEKVKEEFVKRGSYILNQNEIAKIKETMFKNGAINADIVGKSAYIIAKMAGIEVPQTTKILIGEVQSVEKSELFSHEKLSPVLAMYKVKDFDEALKKAERLIELGGSGHTSSLYIDSQNNKDKVKEFGLAMKTSRTFINMPSSQGASGDLYNFAIAPSFTLGCGTWGGNSVSQNVEPKHLLNIKSVAERREKRPWFKVPQKIYFKYGCLRFALKELKDMNKKRAFIVTDKDLFKLGYVNKITKVLDEIDIKYSIFTDIKSDPTIDSVKKGAKEMLNFEPDTIISIGGGSPMDAAKVMHLLYEYPEAEIENLAINFMDIRKRICNFPKLGTKAISVAIPTTAGTGSEATPFAVITNDETGMKYPLTSYELTPNMAIIDTELMLNMPRKLTAATGIDALVHAIEAYVSVMATDYTDELALRAIKMIFKYLPRAYKNGTNDIEAREKMAHASNIAGMAFANAFLGVCHSMAHKLGAMHHVPHGIACAVLIEEVIKYNATDCPTKQTAFPQYKSPNAKRKYAEIAEYLNLKGTSDTEKVTALIEAISKLKIDLSIPQNISAAGINKKDFYNTLDKMSELAFDDQCTTANPRYPLISELKDIYIKSF

SEQ ID NO: 83 - protein, 858 aa, Artificial Sequence
  Synthetic Construct
MKVTNQKELKQKLNELREAQKKFATYTQEQVDKIFKQCAIAAAKLRINLAKLAVEETGIGLVEDKIIKNHFAAEYIYNKYKNEKTCGIIDHDDSLGITKVAEPIGIVAAIVPTTNPTSTAIFKSLISLKTRNAIFFSPHPRAKKSTIAAATLILDAAVKAGAPKNIIGWIDEPSIELSQDLMSEADIILATGGPSMVKAAYSSGKPAIGVGAGNTPAIIDESADIDMAVSSIILSKTYDNGVICASEQSILVMNSIYEKVKEEFVKRGSYILNQNEIAKIKETMFKNGAINADIVGKSAYIIAKMAGIEVPQTTKILIGEVQSVEKSELFSHEKLSPVLAMYKVKDFDEALKLAQRLIELGGSGHTSSLYIDSQNNKDKVKEFGLAMKTSRTFINMPSSQGASGDLYNFAIAPSFTLGCGTWGGNSVSQNVEPKHLLNIKSVAERREKRPWFKVPQKIYFKYGCLRFALKELKDMNKKRAFIVTDKDLFKLGYVNKITKVLDEIDIKYSIFTDIKSDPTIDSVKKGAKEMLNFEPDTIISIGGGSPMDAAKVMHLLYEYPEAEIENLAINFMDIRKRICNFPKLGTKAISVAIPTTAGTGSEATPFAVITNDETGMKYPLTSYELTPNMAIIDTELMLNMPRKLTAATGIDALVHAIEAYVSVMATDYTDELALRAIKMIFKYLPRAYKNGTNDIEAREKMAHASNIAGMAFANAFLGVCHSMAHKLGAMHHVPHGIACAVLIEEVIKYNATDCPTKQTAFPQYKSPNAKRKYAEIAEYLNLKGTSDTEKVTALIEAISKLKIDLSIPQNISAAGINKKDFYNTLDKMSELAFDDQCTTANPRYPLISELKDIYIKSF

SEQ ID NO: 84 - protein, 858 aa, Artificial Sequence
  Synthetic Construct
MKVTNQKELKQKLNELREAQKKFLTMTQEQVDKIFKQCAIAAAKERINLAKLAVEETGIGLVEDKIIKNHFAAEYIYNKYKNEKTCGIIDHDDSLGITKVAEPIGIVAAIVPTTNPTSTAIFKSLISLKTRNAIFFSPHPRAKKSTIAAAKLILDAAVKAGAPKNIIGWIDEPSIELSQDLMSEADIILATGGPSMVKAAYSSGKPAIGVGAGNTPAIIDESADIDMAVSSIILSKTYDNGVICASEQSILVMNSIYEKVKEEFVKRGSYILNQNEIAKIKETMFKNGAINADIVGKSAYIIAKMAGIEVPQTTKILIGEVQSVEKSELFSHEKLSPVLAMYKVKDFDEALKKAQRLIHLGGSGHTSSLYIDSQNNKDKVKEFGLAMKTSRTFINMPSSQGASGDLYNFAIAPSFTLGCGTWGGNSVSQNVEPKHLLNIKSVAERREKRPWFKVPQKIYFKYGCLRFALKELKDMNKKRAFIVTDKDLFKLGYVNKITKVLDEIDIKYSIFTDIKSDPTIDSVKKGAKEMLNFEPDTIISIGGGSPMDAAKVMHLLYEYPEAEIENLAINFMDIRKRICNFPKLGTKAISVAIPTTAGTGSEATPFAVITNDETGMKYPLTSYELTPNMAIIDTELMLNMPRKLTAATGIDALVHAIEAYVSVMATDYTDELALRAIKMIFKYLPRAYKNGTNDIEAREKMAHASNIAGMAFANAFLGVCHSMAHKLGAMHHVPHGIACAVLIEEVIKYNATDCPTKQTAFPQYKSPNAKRKYAEIAEYLNLKGTSDTEKVTALIEAISKLKIDLSIPQNISAAGINKKDFYNTLDKMSELAFDDQCTTANPRYPLISELKDIYIKSF

SEQ ID NO: 85 - protein, 858 aa, Artificial Sequence
  Synthetic Construct
MKVTNQKELKQKLNELREAQKKFACYTQEQVEKIFKQCAIAAAKERINLAKLAVEETGIGLVEDKIIKNHFAAEYIYNKYKNEKTCGIIDHDDSLGITKVAEPIGIVAAIVPTTNPTSTAIFKSLISLKTRNAIFFSPHPRAKKSTIAAAKLILDAAVKAGAPKNIIGWIDEPSIELSQDLMSEADIILATGGPSMVKAAYSSGKPAIGVGAGNTPAIIDESADIDMAVSSIILSKTYDNGVICASEQSILVMNSIYEKVKEEFVKRGSYILNQNEIAKIKETMFKNGAINADIVGKSAYIIAKMAGIEVPQTTKILIGEVQSVEKSELFSHEKLSPVLAMYKVKDFDEALKKAQRLIELGGSHHTSSLYIDSQNNKDKVKEFGLAMKTSRTFINMPSSQGASGDLYNFAIAPSFTLGCGTWGGNSVSQNVEPKHLLNIKSVAERREKRPWFKVPQKIYFKYGCLRFALKELKDMNKKRAFIVTDKDLFKLGYVNKITKVLDEIDIKYSIFTDIKSDPTIDSVKKGAKEMLNFEPDTIISIGGGSPMDAAKVMHLLYEYPEAEIENLAINFMDIRKRICNFPKLGTKAISVAIPTTAGTGSEATPFAVITNDETGMKYPLTSYELTPNMAIIDTELMLNMPRKLTAATGIDALVHAIEAYVSVMATDYTDELALRAIKMIFKYLPRAYKNGTNDIEAREKMAHASNIAGMAFANAFLGVCHSMAHKLGAMHHVPHGIACAVLIEEVIKYNATDCPTKQTAFPQYKSPNAKRKYAEIAEYLNLKGTSDTEKVTALIEAISKLKIDLSIPQNISAAGINKKDFYNTLDKMSELAFDDQCTTANPRYPLISELKDIYIKSF

SEQ ID NO: 86 - protein, 858 aa, Artificial Sequence
  Synthetic Construct
MKVTNQKELKQKLNELREAQKKFATCTQEQVDKIFKQCAIAAAKERINLAKLAVEETGIGLVEDKIIKNHFAAEYIYNKYKNEKTCGIIDHDDSLGITKVAEPIGIVAAIVPTTNPTSTAIFKSLISLKTRNAIFFSPHPRAKKSTIAAAKLILDAAVKAGAPKNIIGWIDEPSIELSQDLMSEADIILATGGPSMVKAAYSSGKPAIGVGAGNTPAIIDESADIDMAVSSIILSKTYDNGVICASEQSILVMNSIYEKVKEEFVKRGSYILNQNEIAKIKETMFKNGAINADIVGKSAYIIAKMAGIEVPQFTKILIGEVQSVEKSELFSHEKLSPVLAMYKVKDFDEALKKAQRLIELGGSGHTSSLYIDSQNNKDKVKEFGLAMKTSRTFINMPSSQGASGDLYNFAIAPSFTLACGTWGGNSVSQNVEPKHLLNIKSVAERREKRPWFKVPQKIYFKYGCLRFALKELKDMNKKRAFIVTDKDLFKLGYVNKITKVLDEIDIKYSIFTDIKSDPTIDSVKKGAKEMLNFEPDTIISIGGGSPMDAAKVMHLLYEYPEAEIENLAINFMDIRKRICNFPKLGTKAISVAIPTTAGTGSEATPFAVITNDETGMKYPLTSYELTPNMAIIDTELMLNMPRKLTAATGIDALVHAIEAYVSVMATDYTDELALRAIKMIFKYLPRAYKNGTNDIEAREKMAHASNIAGMAFANAFLGVCHSMAHKLGAMHHVPHGIACAVLIEEVIKYNATDCPTKQTAFPQYKSPNAKRKYAEIAEYLNLKGTSDTEKVTALIEAISKLKIDLSIPQNISAAGINKKDFYNTLDKMSELAFDDQCTTANPRYPLISELKDIYIKSF

SEQ ID NO: 87 - protein, 858 aa, Artificial Sequence
  Synthetic Construct
MKVTNQKELKQKLNELREAQKKFATYTQEQVDKIFKQCAIAAAKERINLAKLAVEETGIGLVEDKIIKNHFAAEYIYNKYKNHKTCGIIDHDDSLGITKVAEPIGIVAAIVPTTNPTSTAIFKSLISLKTRNAIFFSPHPRAKKSTIAAAKLILDAAVKAGAPKNIIGWIDEPSIELSQDLMSEPDIILATGGPSMVKAAYSSGKPAIGVGAGNTPAIIDESADIDMAVSSIILSKTYDNGVICASEQSILVMNSIYEKVKEEFVKRGSYILNQNEIAKIKETMFKNGAINADIVGKSAYIIAKMAGIEVPQTTKILIGEVQSVEKSELFSHEKLSPVLAMYKVKDFDEALKKAQRLINLGGSGHTSSLYIDSQNNKDKVKEFGLAMKTSRTFINMPSSQGASGDLYNFAIAPSFTLGCGTWGGNSVSQNVEPKHLLNIKSVAERREKRPWFKVPQKIYFKYGCLRFALKELKDMNKKRAFIVTDKDLFKLGYVNKITKVLDEIDIKYSIFTDIKSDPTIDSVKKGAKEMLNFEPDTIISIGGGSPMDAAKVMHLLYEYPEAEIENLAINFMDIRKRICNFPKLGTKAISVAIPTTAGTGSEATPFAVITNDETGMKYPLTSYELTPNMAIIDTELMLNMPRKLTAATGIDALVHAIEAYVSVMATDYTDELALRAIKMIFKYLPRAYKNGTNDIEAREKMAHASNIAGMAFANAFLGVCHSMAHKLGAMHHVPHGIACAVLIEEVIKYNATDCPTKQTAFPQYKSPNAKRKYAEIAEYLNLKGTSDTEKVTALIEAISKLKIDLSIPQNISAAGINKKDFYNTLDKMSELAFDDQCTTANPRYPLISELKDIYIKSF

SEQ ID NO: 88 - protein, 858 aa, Artificial Sequence
  Synthetic Construct
MKVTNQKELKQKLNELREAQKKFACYTQEQVDKIFKQCAIAAAKERINLAKLAVEETGIGLVEDKIIKNHFAAEYIYNKEKNEKTCGIIDHDDSLGITKVAEPIGIVAAIVPTTNPTSTAIFKSLISLKTRNAIFFSPHPRAKKSTIAAAKLILDAAVKAGAPKNIIGWIDEPSIELSQDMMSEADIILATGGPSMVKAAYSSGKPAIGVGAGNTPAIIDESADIDMAVSSIILSKTYDNGVICASEQSILVMNSIYEKVKEEFVKRGSYILNQNEIAKIKETMFKNGAINADIVGKSAYIIAKMAGIEVPQTTKILIGEVQSVEKSELFSHEKLSPVLAMYKVKDFDEALKKAQRLIELGGSGHTSSLYIDSQNNKDKVKEFGLAMKTSRTFINMPSSQGASGDLYNFAIAPSFTLGCGTWGGNSVSQNVEPKHLLNIKSVAERREKRPWFKVPQKIYFKYGCLRFALKELKDMNKKRAFIVTDKDLFKLGYVNKITKVLDEIDIKYSIFTDIKSDPTIDSVKKGAKEMLNFEPDTIISIGGGSPMDAAKVMHLLYEYPEAEIENLAINFMDIRKRICNFPKLGTKAISVAIPTTAGTGSEATPFAVITNDETGMKYPLTSYELTPNMAIIDTELMLNMPRKLTAATGIDALVHAIEAYVSVMATDYTDELALRAIKMIFKYLPRAYKNGTNDIEAREKMAHASNIAGMAFANAFLGVCHSMAHKLGAMHHVPHGIACAVLIEEVIKYNATDCPTKQTAFPQYKSPNAKRKYAEIAEYLNLKGTSDTEKVTALIEAISKLKIDLSIPQNISAAGINKKDFYNTLDKMSELAFDDQCTTANPRYPLISELKDIYIKSF

SEQ ID NO: 89 - protein, 858 aa, Artificial Sequence
  Synthetic Construct
MKVTNQKELKQKLNELREAQKKFLTYTQEQVDKIFKQCAIAAAKERINLARLAVEETGIGLVEDKIIKNHFAAEYIYNKYKNEKTCGIIDHDDSLGITKVAEPIGIVAAIVPTTNPTSTAIFKSLISLKTRNAIFFSPHPRAKKSTIAAAKLILDAAVKAGAPKNIIGWIDEPSIELSQDLMSEADIILATGGPSMVKAAYSSGKPAIGVGAGNTPAIIDESADIDMAVSSIILSKTYDNGVICASEQSILVMNSIYEKVKEEFVKRGSYILNQEEIAKIKETMFKNGAINADIVGKSAYIIAKMAGIEVPQTTKILIGEVQSVEKSELFSHEKLSPVLAMYKVKDFDEALKKAQRLIELGGSGHTSSLYIDSQNNKDKVKEFGLAMKTSRTFINMPSSQGASGDLYNFAIAPSFTLGCGTWGGNSVSQNVEPKHLLNIKSVAERREKRPWFKVPQKIYFKYGCLRFALKELKDMNKKRAFIVTDKDLFKLGYVNKITKVLDEIDIKYSIFTDIKSDPTIDSVKKGAKEMLNFEPDTIISIGGGSPMDAAKVMHLLYEYPEAEIENLAINFMDIRKRICNFPKLGTKAISVAIPTTAGTGSEATPFAVITNDETGMKYPLTSYELTPNMAIIDTELMLNMPRKLTAATGIDALVHAIEAYVSVMATDYTDELALRAIKMIFKYLPRAYKNGTNDIEAREKMAHASNIAGMAFANAFLGVCHSMAHKLGAMHHVPHGIACAVLIEEVIKYNATDCPTKQTAFPQYKSPNAKRKYAEIAEYLNLKGTSDTEKVTALIEAISKLKIDLSIPQNISAAGINKKDFYNTLDKMSELAFDDQCTTANPRYPLISELKDIYIKSF

SEQ ID NO: 90 - protein, 858 aa, Artificial Sequence
  Synthetic Construct
MKVTNQKELKQKLNELREAQKKFATMTQEQVDKIFKQCAIAAAKERINLAKLAVEETGIGLVEDKIIKNHFAAEYIYNKYKNEKTCGIIDHDDSLGITKVAEPIGIVAAIVPTTNPTSTAIFKSLISLKTRNAIFFSPHPRAKKSTIAAAKLILDAAVKAGAPKNIIGWIDEPSIELSQDMMSEADIILATGGPSMVKAAYSSGKPAIGVGAGNTPAIIDESADIDMAVSSIILSKTYDNGVICASEQSILVMNSIYEKVKEEFVKRGSYILNQNEIAKIKETMFKNGAINADIVGKSAYIIAKMAGIEVPQTTKILIGEVQSVEKSELFSHEKLSPVLAMYKVKDFDEALKKAQRLIELGGSGHTSSLYSDSQNNKDKVKEFGLAMKTSRTFINMPSSQGASGDLYNFAIAPSFTLGCGTWGGNSVSQNVEPKHLLNIKSVAERREKRPWFKVPQKIYFKYGCLRFALKELKDMNKKRAFIVTDKDLFKLGYVNKITKVLDEIDIKYSIFTDIKSDPTIDSVKKGAKEMLNFEPDTIISIGGGSPMDAAKVMHLLYEYPEAEIENLAINFMDIRKRICNFPKLGTKAISVAIPTTAGTGSEATPFAVITNDETGMKYPLTSYELTPNMAIIDTELMLNMPRKLTAATGIDALVHAIEAYVSVMATDYTDELALRAIKMIFKYLPRAYKNGTNDIEAREKMAHASNIAGMAFANAFLGVCHSMAHKLGAMHHVPHGIACAVLIEEVIKYNATDCPTKQTAFPQYKSPNAKRKYAEIAEYLNLKGTSDTEKVTALIEAISKLKIDLSIPQNISAAGINKKDFYNTLDKMSELAFDDQCTTANPRYPLISELKDIYIKSF

SEQ ID NO: 91 - protein, 858 aa, Artificial Sequence
  Synthetic Construct
MKVTNQKELKQKLNELREAQKKFATYTQEQVDKIFKQCAIAAAKERINLAKLAVEETGIGLVEDKIIKNHFAAEYIYNKYKNEKTCGIIDHDDSLGITKVAEPIGIVASIVPTTNPTSTAIFKSLISLKTRNAIFFSPHPRAKKSTIAAAKLILDAAVKAGAPKNIIGWIDEPSIELSQDLMSEADIILATGGPSMVKAAYSSGKPAIGVGAGNTPAIIDESADIDMAVSSIILSKTYDNGVICASEQSILVMNSIYEKVKEEFVKRGSYILNQNEIAKIKETMFKNGAINADIVGKSAYIIAKMAGIEVPQFTKILIGEVQSVEKSELFSHEKLSPVLAMYKVKDFDEALKKAQRLIELGGSGHTSSLYIDSQNNKDKVKEFGLRMKTSRTFINMPSSQGASGDLYNFAIAPSFTLGCGTWGGNSVSQNVEPKHLLNIKSVAERREKRPWFKVPQKIYFKYGCLRFALKELKDMNKKRAFIVTDKDLFKLGYVNKITKVLDEIDIKYSIFTDIKSDPTIDSVKKGAKEMLNFEPDTIISIGGGSPMDAAKVMHLLYEYPEAEIENLAINFMDIRKRICNFPKLGTKAISVAIPTTAGTGSEATPFAVITNDETGMKYPLTSYELTPNMAIIDTELMLNMPRKLTAATGIDALVHAIEAYVSVMATDYTDELALRAIKMIFKYLPRAYKNGTNDIEAREKMAHASNIAGMAFANAFLGVCHSMAHKLGAMHHVPHGIACAVLIEEVIKYNATDCPTKQTAFPQYKSPNAKRKYAEIAEYLNLKGTSDTEKVTALIEAISKLKIDLSIPQNISAAGINKKDFYNTLDKMSELAFDDQCTTANPRYPLISELKDIYIKSF

SEQ ID NO: 92 - protein, 858 aa, Artificial Sequence
  Synthetic Construct
MKVTNQKELKQKLNELREAQKKFATYTQEQVDKIFKQCAIAAAKERINLAKLAVEETGIGLVEDKIIKNHFAAEYIYNKYKNEKTCGIIDHDDSLGITKVAEPIGIVAAIVPTTNPTSTAIFKSLISLKTRNAIFFSPHPRAKKSTIAAAKLILDAAVKAGAPKNIIGWIDEPSIELSQDLMSEADIILATGGPSMVKAAYSSGKPAIGVGAGNTPAIIDESADIDMAVSSIILSKTYDNGVICASEQSILVMNSIYEKVKEEFVKRGSYILNQNEIAKIKETMFKNGAINADIVGKSAYIIAKMAGIEVPQTTKILIGEVQSVEKSELFSEEKLSPVLAMYKVKDFDEALKKAQRLIELGGSGHTSSLYIDSQNNKDKVKEFGLAMKTSITFINMPSSQGASGDLYNFAIAPSFTLGCGTWGGNSVSQNVEPKHLLNIVSVAERREKRPWFKVPQKIYFKYGCLRFALKELKDMNKKRAFIVTDKDLFKLGYVNKITKVLDEIDIKYSIFTDIKSDPTIDSVKKGAKEMLNFEPDTIISIGGGSPMDAAKVMHLLYEYPEAEIENLAINFMDIRKRICNFPKLGTKAISVAIPTTAGTGSEATPFAVITNDETGMKYPLTSYELTPNMAIIDTELMLNMPRKLTAATGIDALVHAIEAYVSVMATDYTDELALRAIKMIFKYLPRAYKNGTNDIEAREKMAHASNIAGMAFANAFLGVCHSMAHKLGAMHHVPHGIACAVLIEEVIKYNATDCPTKQTAFPQYKSPNAKRKYAEIAEYLNLKGTSDTEKVTALIEAISKLKIDLSIPQNISAAGINKKDFYNTLDKMSELAFDDQCTTANPRYPLISELKDIYIKSF

SEQ ID NO: 93 - protein, 858 aa, Artificial Sequence
  Synthetic Construct
MKVTNQKELKQKLNELREAQKKFATYTQEQVDKIFKQCAIAAAKERINLAKLAVEETGIGLVEDKIIKNHFAAEYIYNKYKNEKTCGIIDHDDSLGITKVAEPIGIVAAIVPTTNPTSTAIFKSLISLKTRNAIFFSPHPRAKKSTIAAAKLILDAAVKAGAPKNIIGWIDEPSIELSQDLMKEADIILATGGPSMVKAAYSSGKKAIGVGAGNTPAIIDESADIDMAVSSIILSKTYDNGVICASEQSILVMNSIYEKVKEEFVKRGSYILNQNEIAKIKETMFKNGAINADIVGKSAYIIAKMAGIEVPQTTKILIGEVQSVEKSELFSHEKLSPVLAMYKVKDFDEALKKAQRLIELGGSHHTSSLYIDSQNNKDKVKEFGLAMKTSRTFINMPSSQGASGDLYNFAIAPSFTLGCGTWGGNSVSQNVEPKHLLNIKSVAERREKRPWFKVPQKIYFKYGCLRFALKELKDMNKKRAFIVTDKDLFKLGYVNKITKVLDEIDIKYSIFTDIKSDPTIDSVKKGAKEMLNFEPDTIISIGGGSPMDAAKVMHLLYEYPEAEIENLAINFMDIRKRICNFPKLGTKAISVAIPTTAGTGSEATPFAVITNDETGMKYPLTSYELTPNMAIIDTELMLNMPRKLTAATGIDALVHAIEAYVSVMATDYTDELALRAIKMIFKYLPRAYKNGTNDIEAREKMAHASNIAGMAFANAFLGVCHSMAHKLGAMHHVPHGIACAVLIEEVIKYNATDCPTKQTAFPQYKSPNAKRKYAEIAEYLNLKGTSDTEKVTALIEAISKLKIDLSIPQNISAAGINKKDFYNTLDKMSELAFDDQCTTANPRYPLISELKDIYIKSF

SEQ ID NO: 94 - protein, 858 aa, Artificial Sequence
  Synthetic Construct
MKVTNQKELKQKLNELREAQKKFATYTQEQVDKIFKQCAIAAAKYRINLAKLAVEETGIGLVEDKIIKNHFAAEYIYNKYKNHKTCGIIDHDDSLGITKVAEPIGIVAAIVPTTNPTSTAIFKSLISLKTRNAIFFSPHPRAKKSTIAAAKLILDAAVKAGAPKNIIGWIDEPSIELSQDLMKEADIILATGGPSMVKAAYSSGKPAIGVGAGNTPAIIDESADIDMAVSSIILSKTYDNGVICASEQSILVMNSIYEKVKEEFVKRGSYILNQNEIAKIKETMFKNGAINADIVGKSAYIIAKMAGIEVPQTTKILIGEVQSVEKSELFSHEKLSPVLAMYKVKDFDEALKKAQRLIELGGSGHTSSLYIDSQNNKDKVKEFGLAMKTSRTFINMPSSQGASGDLYNFAIAPSFTLGCGTWGGNSVSQNVEPKHLLNIKSVAERREKRPWFKVPQKIYFKYGCLRFALKELKDMNKKRAFIVTDKDLFKLGYVNKITKVLDEIDIKYSIFTDIKSDPTIDSVKKGAKEMLNFEPDTIISIGGGSPMDAAKVMHLLYEYPEAEIENLAINFMDIRKRICNFPKLGTKAISVAIPTTAGTGSEATPFAVITNDETGMKYPLTSYELTPNMAIIDTELMLNMPRKLTAATGIDALVHAIEAYVSVMATDYTDELALRAIKMIFKYLPRAYKNGTNDIEAREKMAHASNIAGMAFANAFLGVCHSMAHKLGAMHHVPHGIACAVLIEEVIKYNATDCPTKQTAFPQYKSPNAKRKYAEIAEYLNLKGTSDTEKVTALIEAISKLKIDLSIPQNISAAGINKKDFYNTLDKMSELAFDDQCTTANPRYPLISELKDIYIKSF

SEQ ID NO: 95 - protein, 858 aa, Artificial Sequence
  Synthetic Construct
MKVTNQKELKQKLNELREAQKKFATYTQAQVDKIFKQCAIAAAKERINLAKLAVEETGIGLVEDKIIKNHFAAEYIYNKYKNEKTCGIIDHDDSLGITKVAEPIGIVAAIVPTTNPTSTAIFKSLISLKTRNAIFFSPHPRAKKSTIAAAKLILDAAVKAGAPKNIIGWIDEPSIELSQDLMSEADIILATGGPSMVKAAYSSGKPAIGVGAGNTPAIIDESADIDMAVSSIILSKTYDNGVICASEQSILVMNSIYEKVKEEFVKRGSYILNQNEIAKIKETMFKNGAINADIVGKSAYIIAKMAGIEVPQTTKILIGEVQDVEKSELFSHEKLSPVLAMYKVKDFDEALKKAQRLIELGGSGHTSSLYIDSQNNKDKVKEFGLAMKTSRTFINMPSSQGASGDLYNFAIAPSFTLGCPTWGGNSVSQNVEPKHLLNIKSVAERREKRPWFKVPQKIYFKYGCLRFALKELKDMNKKRAFIVTDKDLFKLGYVNKITKVLDEIDIKYSIFTDIKSDPTIDSVKKGAKEMLNFEPDTIISIGGGSPMDAAKVMHLLYEYPEAEIENLAINFMDIRKRICNFPKLGTKAISVAIPTTAGTGSEATPFAVITNDETGMKYPLTSYELTPNMAIIDTELMLNMPRKLTAATGIDALVHAIEAYVSVMATDYTDELALRAIKMIFKYLPRAYKNGTNDIEAREKMAHASNIAGMAFANAFLGVCHSMAHKLGAMHHVPHGIACAVLIEEVIKYNATDCPTKQTAFPQYKSPNAKRKYAEIAEYLNLKGTSDTEKVTALIEAISKLKIDLSIPQNISAAGINKKDFYNTLDKMSELAFDDQCTTANPRYPLISELKDIYIKSF

SEQ ID NO: 96 - protein, 858 aa, Artificial Sequence
  Synthetic Construct
MKVTNQKELKQKLNELREAQKKFATMTQEQVDKIFKQCAIAAAKERINLAKLAVEETGIGLVEDKIIKNHFAAEYIYNKYKNEKTCGIIDHDDSLGITKVAEPIGIVAAIVPTTNPTSTAIFKSLISLKTRNAIFFSPHPRAKKSTIAAAKLILDAAVKAGAPKNIIGWIDEPSIELSQDLMSEADIILATGGPSMVKAAYSSGKPAIGVGAGNTPAIIDESADIDMAVSSIILSKTYDNGVICASEQSILVMNSIYEKVKEEFVKRGSYILNQQEIAKIKETMFKNGAINADIVGKSAYIIAKMAGIEVPQTTKILIGEVQSVEKSELFSHEKLSPVLAMYKVKDFDEALKKAQRLIELGGSGHTSSLYIDSQNNKDKVKEFGLAMKTSRTFINMPSSQGASGDLYNFAIAPSFTLGCGTWEGNSVSQNVEPKHLLNIKSVAERREKRPWFKVPQKIYFKYGCLRFALKELKDMNKKRAFIVTDKDLFKLGYVNKITKVLDEIDIKYSIFTDIKSDPTIDSVKKGAKEMLNFEPDTIISIGGGSPMDAAKVMHLLYEYPEAEIENLAINFMDIRKRICNFPKLGTKAISVAIPTTAGTGSEATPFAVITNDETGMKYPLTSYELTPNMAIIDTELMLNMPRKLTAATGIDALVHAIEAYVSVMATDYTDELALRAIKMIFKYLPRAYKNGTNDIEAREKMAHASNIAGMAFANAFLGVCHSMAHKLGAMHHVPHGIACAVLIEEVIKYNATDCPTKQTAFPQYKSPNAKRKYAEIAEYLNLKGTSDTEKVTALIEAISKLKIDLSIPQNISAAGINKKDFYNTLDKMSELAFDDQCTTANPRYPLISELKDIYIKSF

SEQ ID NO: 97 - protein, 858 aa, Artificial Sequence
  Synthetic Construct
MKVTNQKELKQKLNELREAQKKFATYTQEQVDKIFKQCAIAAAKERINLAKLAVEETGIGLVEDKIIKNHFAAEYIYNKYKNEKTCGIIDHDDSLGITKVAEPIGIVAAIVPTTNPTSTAIFKSLISLKTRNAIFFSPHPRAKKSTIAAATLILDAAVKAGAPKNIIGWIDEPSIELSQDLMSEADIILATGGPSMVKAAYSSGKPAIGVGAGNTPAIIDESADIDMAVSSIILSKTYDNGVICASEQSILVMNSIYEKVKEEFVKRGSYILNQNEIAKIKETMFKNGAINADIVGKSAYIIAKMAGIEVPQTTKILIGEVQSVEKSELFSHEKLSPVLAMYKVKDFDEALKKAERLIELGGSGHTSSLYIDSQNNKDKVKEFGLAMKTSITFINMPSSQGASGDLYNFAIAPSFTLGCGTWGGNSVSQNVEPKHLLNIKSVAERREKRPWFKVPQKIYFKYGCLRFALKELKDMNKKRAFIVTDKDLFKLGYVNKITKVLDEIDIKYSIFTDIKSDPTIDSVKKGAKEMLNFEPDTIISIGGGSPMDAAKVMHLLYEYPEAEIENLAINFMDIRKRICNFPKLGTKAISVAIPTTAGTGSEATPFAVITNDETGMKYPLTSYELTPNMAIIDTELMLNMPRKLTAATGIDALVHAIEAYVSVMATDYTDELALRAIKMIFKYLPRAYKNGTNDIEAREKMAHASNIAGMAFANAFLGVCHSMAHKLGAMHHVPHGIACAVLIEEVIKYNATDCPTKQTAFPQYKSPNAKRKYAEIAEYLNLKGTSDTEKVTALIEAISKLKIDLSIPQNISAAGINKKDFYNTLDKMSELAFDDQCTTANPRYPLISELKDIYIKSF

SEQ ID NO: 98 - protein, 858 aa, Artificial Sequence
  Synthetic Construct
MKVTNQKELKQKLNELREAQKKFATYTQAQVEKIFKQCAIAAAKERINLAKLAVEETGIGLVEDKIIKNHFAAEYIYNKYKNEKTCGIIDHDDSLGITKVAEPIGIVAAIVPTTNPTSTAIFKSLISLKTRNAIFFSPHPRAKKSTIAAAKLILDAAVKAGAPKNIIGWIDEPSIELSQDLMSEADIILATGGPSMVKAAYSSGKPAIGVGAGNTPAIIDESADIDMAVSSIILSKTYDNGVICASEQSILVMNSIYEKVKEEFVKRGSYILNQNEIAKIKETMFKNGAINADIVGKSAYIIAKMAGIEVPQTTKILIGEVQSVEKSELFSHEKLSPVLAMYKVKDFDEALKKAQRLIELGGSGHTSSLYIDSQNNKDKVKEFGLAMKTSRTFINMPSSQGASGDLYNFAIAPSFTLACGTWGGNSVSQNVEPKHLLNIKSVAERREKRPWFKVPQKIYFKYGCLRFALKELKDMNKKRAFIVTDKDLFKLGYVNKITKVLDEIDIKYSIFTDIKSDPTIDSVKKGAKEMLNFEPDTIISIGGGSPMDAAKVMHLLYEYPEAEIENLAINFMDIRKRICNFPKLGTKAISVAIPTTAGTGSEATPFAVITNDETGMKYPLTSYELTPNMAIIDTELMLNMPRKLTAATGIDALVHAIEAYVSVMATDYTDELALRAIKMIFKYLPRAYKNGTNDIEAREKMAHASNIAGMAFANAFLGVCHSMAHKLGAMHHVPHGIACAVLIEEVIKYNATDCPTKQTAFPQYKSPNAKRKYAEIAEYLNLKGTSDTEKVTALIEAISKLKIDLSIPQNISAAGINKKDFYNTLDKMSELAFDDQCTTANPRYPLISELKDIYIKSF

SEQ ID NO: 99 - protein, 858 aa, Artificial Sequence
  Synthetic Construct
MKVTNQKELKQKLNELREAQKKFATYTQEQVDKIFKQCAIAAAKERINLAELAVEETGIGLVEDKIIKNHFAAEYIYNKYKNEKTCGIIDHDDSLGITKVAEPIGIVASIVPTTNPTSTAIFKSLISLKTRNAIFFSPHPRAKKSTIAAAKLILDAAVKAGAPKNIIGWIDEPSIELSQDLMSEPDIILATGGPSMVKAAYSSGKPAIGVGAGNTPAIIDESADIDMAVSSIILSKTYDNGVICASEQSILVMNSIYEKVKEEFVKRGSYILNQNEIAKIKETMFKNGAINADIVGKSAYIIAKMAGIEVPQTTKILIGEVQSVEKSELFSHEKLSPVLAMYKVKDFDEALKKAQRLIELGGSGHTSSLYIDSQNNKDKVKEFGLAMKTSRTFINMPSSQGASGDLYNFAIAPSFTLGCGTWGGNSVSQNVEPKHLLNIKSVAERREKRPWFKVPQKIYFKYGCLRFALKELKDMNKKRAFIVTDKDLFKLGYVNKITKVLDEIDIKYSIFTDIKSDPTIDSVKKGAKEMLNFEPDTIISIGGGSPMDAAKVMHLLYEYPEAEIENLAINFMDIRKRICNFPKLGTKAISVAIPTTAGTGSEATPFAVITNDETGMKYPLTSYELTPNMAIIDTELMLNMPRKLTAATGIDALVHAIEAYVSVMATDYTDELALRAIKMIFKYLPRAYKNGTNDIEAREKMAHASNIAGMAFANAFLGVCHSMAHKLGAMHHVPHGIACAVLIEEVIKYNATDCPTKQTAFPQYKSPNAKRKYAEIAEYLNLKGTSDTEKVTALIEAISKLKIDLSIPQNISAAGINKKDFYNTLDKMSELAFDDQCTTANPRYPLISELKDIYIKSF

SEQ ID NO: 100 - protein, 858 aa, Artificial Sequence
  Synthetic Construct
MKVTNQKELKQKLNELREAQKKFATYTQEQVDKIFKQCAIAAAKERINLAKLAVEETGIGLVEDKIIKNHFAAEYIYNKYKNEKTCGIIDHDDSLGITKVAEPIGIVAAIVPTTNPTSTAIFKSLISLATRNAIFFSPHPRAKKSTIAAAKLILDAAVKAGAPKNIIGWIDEPSIELSQDLMSEADIILATGGPSMVKAAYSSGKPAIGVGAGNTPAIIDESADIDMAVSSIILSKTYDNNVICASEQSILVMNSIYEKVKEEFVKRGSYILNQNEIAKIKETMFKNGAINADIVGKSAYIIAKMAGIEVPQTTKILIGEVQSVEKSELFSHEKLSPVLAMYKVKDFDEALKKAQRLIELGGSGHTSSLYIDSQNNKDKVKEFGLRMKTSRTFINMPSSQGASGDLYNFAIAPSFTLGCGTWGGNSVSQNVEPKHLLNIKSVAERREKRPWFKVPQKIYFKYGCLRFALKELKDMNKKRAFIVTDKDLFKLGYVNKITKVLDEIDIKYSIFTDIKSDPTIDSVKKGAKEMLNFEPDTIISIGGGSPMDAAKVMHLLYEYPEAEIENLAINFMDIRKRICNFPKLGTKAISVAIPTTAGTGSEATPFAVITNDETGMKYPLTSYELTPNMAIIDTELMLNMPRKLTAATGIDALVHAIEAYVSVMATDYTDELALRAIKMIFKYLPRAYKNGTNDIEAREKMAHASNIAGMAFANAFLGVCHSMAHKLGAMHHVPHGIACAVLIEEVIKYNATDCPTKQTAFPQYKSPNAKRKYAEIAEYLNLKGTSDTEKVTALIEAISKLKIDLSIPQNISAAGINKKDFYNTLDKMSELAFDDQCTTANPRYPLISELKDIYIKSF

SEQ ID NO: 101 - protein, 858 aa, Artificial Sequence
  Synthetic Construct
MKVTNQKELKQKLNELREAQKKFATYTQEQVDKIFKQCAIAAAKERINLARLAVEETGIGLVEDKIIKNHFAAEYIYNKYKNEKTCGIIDHDDSLGITKVAEPIGIVAAIVPTTNPTSTAIFKSLISLKTRNAIFFSPHPRAKKSTIAAAKLILDAAVKAGAPKNIIGWIDEPSIELSQDLMSEADIILATGGPSMVKAAYSSGKPAIGVGAGNTPAIIDESADIDMAVSSIILSKTYDNGVICASEQSILVMNSIYEKVKKEFVKRGSYILNQNEIAKIKETMFKNGAINADIVGKSAYIIAKMAGIEVPQTTKILIGEVQSVEKSELFSHEKLSPVLAMYKVKDFDEALKKAQRLIELGGSGHTSSLYIDSQNNKDKVKEFGLAMKTSRFFINMPSSQGASGDLYNFAIAPSFTLGCGTWGGNSVSQNVEPKHLLNIKSVAERREKRPWFKVPQKIYFKYGCLRFALKELKDMNKKRAFIVTDKDLFKLGYVNKITKVLDEIDIKYSIFTDIKSDPTIDSVKKGAKEMLNFEPDTIISIGGGSPMDAAKVMHLLYEYPEAEIENLAINFMDIRKRICNFPKLGTKAISVAIPTTAGTGSEATPFAVITNDETGMKYPLTSYELTPNMAIIDTELMLNMPRKLTAATGIDALVHAIEAYVSVMATDYTDELALRAIKMIFKYLPRAYKNGTNDIEAREKMAHASNIAGMAFANAFLGVCHSMAHKLGAMHHVPHGIACAVLIEEVIKYNATDCPTKQTAFPQYKSPNAKRKYAEIAEYLNLKGTSDTEKVTALIEAISKLKIDLSIPQNISAAGINKKDFYNTLDKMSELAFDDQCTTANPRYPLISELKDIYIKSF

SEQ ID NO: 102 - protein, 858 aa, Artificial Sequence
  Synthetic Construct
MKVTNQKELKQKLNELREAQKKFNTYTQEQVDKIFKQCAIAAAKERINLAKLAVEETGIGLVEDKIIKNHFAAEYIYNKYKNEKTCGIIDHDDSLGITKVAEPIGIVAAIVPTTNPTSTAIFKSLISLKTRNAIFFSPHPRAKKSTIAAAKLILDAAVKAGAPKNIIGWIDEPSIELSQDLMSEADIILATGGPSMVKAAYSSGKPAIGVGAGNTPAIIDESADIDMAVSSIILSKTYDNGVICASEQSILVMNSIYEKVKEEFVKRGSYILNQNEIAKIKETMFKNGAINADIVGKSAYIIAKMAGIEVPQTTKILIGEVQHVEKSELFSHEKLSPVLAMYKVKDFDEALKKAQRLIELGGSGHTSSLYIDSQNNKDKVKEFGLAMKTSRTFINMPSSQGASGDLYNFAIAPSFTLGCGTWGGNSVSQNVEPKHLLNIKSVARRREKRPWFKVPQKIYFKYGCLRFALKELKDMNKKRAFIVTDKDLFKLGYVNKITKVLDEIDIKYSIFTDIKSDPTIDSVKKGAKEMLNFEPDTIISIGGGSPMDAAKVMHLLYEYPEAEIENLAINFMDIRKRICNFPKLGTKAISVAIPTTAGTGSEATPFAVITNDETGMKYPLTSYELTPNMAIIDTELMLNMPRKLTAATGIDALVHAIEAYVSVMATDYTDELALRAIKMIFKYLPRAYKNGTNDIEAREKMAHASNIAGMAFANAFLGVCHSMAHKLGAMHHVPHGIACAVLIEEVIKYNATDCPTKQTAFPQYKSPNAKRKYAEIAEYLNLKGTSDTEKVTALIEAISKLKIDLSIPQNISAAGINKKDFYNTLDKMSELAFDDQCTTANPRYPLISELKDIYIKSF

SEQ ID NO: 103 - protein, 858 aa, Artificial Sequence
  Synthetic Construct
MKVTNQKELKQKDNELREAQKKFATYTQEQVDKIFKQCAIAAAKERINLAKLAVEETGIGLVEDKIIKNHFAAEYIYNKYKNEKTCGIIDHDDSLGITKVAEPIGIVAAIVPTTNPTSTAIFKSLISLKTRNAIFFSPHPRAKKSTIAAAKLILDAAVKAGAPKNIIGWIDEPSIELSQDMMSEADIILATGGPSMVKAAYSSGKPAIGVGAGNTPAIIDESADIDMAVSSIILSKTYDNGVICASEQSILVMNSIYEKVKEEFVKRGSYILNQNAIAKIKETMFKNGAINADIVGKSAYIIAKMAGIEVPQTTKILIGEVQSVEKSELFSHEKLSPVLAMYKVKDFDEALKKAQRLIELGGSGHTSSLYIDSQNNKDKVKEFGLAMKTSRTFINMPSSQGASGDLYNFAIAPSFTLGCGTWGGNSVSQNVEPKHLLNIKSVAERREKRPWFKVPQKIYFKYGCLRFALKELKDMNKKRAFIVTDKDLFKLGYVNKITKVLDEIDIKYSIFTDIKSDPTIDSVKKGAKEMLNFEPDTIISIGGGSPMDAAKVMHLLYEYPEAEIENLAINFMDIRKRICNFPKLGTKAISVAIPTTAGTGSEATPFAVITNDETGMKYPLTSYELTPNMAIIDTELMLNMPRKLTAATGIDALVHAIEAYVSVMATDYTDELALRAIKMIFKYLPRAYKNGTNDIEAREKMAHASNIAGMAFANAFLGVCHSMAHKLGAMHHVPHGIACAVLIEEVIKYNATDCPTKQTAFPQYKSPNAKRKYAEIAEYLNLKGTSDTEKVTALIEAISKLKIDLSIPQNISAAGINKKDFYNTLDKMSELAFDDQCTTANPRYPLISELKDIYIKSF

SEQ ID NO: 104 - protein, 858 aa, Artificial Sequence
  Synthetic Construct
MKVTNQKELKQKLNELREAQKKFATYTQAQVDKIFKQCAIAAAKYRINLAKLAVEETGIGLVEDKIIKNHFAAEYIYNKYKNEKTCGIIDHDDSLGITKVAEPIGIVAAIVPTTNPTSTAIFKSLISLKTRNAIFFSPHPRAKKSTIAAAKLILDAAVKAGAPKNIIGWIDEPSIELSQDLMSEADIILATGGPSMVKAAYSSGKPAIGVGAGNTPAIIDESADIDMAVSSIILSKTYDNGVICASEQSILVMNSIYEKVKEEFVKRGSYILNQNEIAKIKETMFKNGAINADIVGKSAYIIAKMAGIEVPQTTKILIGEVQSVEKSELFSHEKLSPVLAMYKVKDFDEALKKAQRLIHLGGSGHTSSLYIDSQNNKDKVKEFGLAMKTSRTFINMPSSQGASGDLYNFAIAPSFTLGCGTWGGNSVSQNVEPKHLLNIKSVAERREKRPWFKVPQKIYFKYGCLRFALKELKDMNKKRAFIVTDKDLFKLGYVNKITKVLDEIDIKYSIFTDIKSDPTIDSVKKGAKEMLNFEPDTIISIGGGSPMDAAKVMHLLYEYPEAEIENLAINFMDIRKRICNFPKLGTKAISVAIPTTAGTGSEATPFAVITNDETGMKYPLTSYELTPNMAIIDTELMLNMPRKLTAATGIDALVHAIEAYVSVMATDYTDELALRAIKMIFKYLPRAYKNGTNDIEAREKMAHASNIAGMAFANAFLGVCHSMAHKLGAMHHVPHGIACAVLIEEVIKYNATDCPTKQTAFPQYKSPNAKRKYAEIAEYLNLKGTSDTEKVTALIEAISKLKIDLSIPQNISAAGINKKDFYNTLDKMSELAFDDQCTTANPRYPLISELKDIYIKSF

SEQ ID NO: 105 - protein, 858 aa, Artificial Sequence
  Synthetic Construct
MKVTNQKELKQKLNELREAQKKFATYTQEQVDKIFKQCAIAAAKERINLAKLAVEETGIGLVEDKIIKNHFAAEYIYNKYKNGKTCGIIDHDDSLGITKVAEPIGIVAAIVPTTNPTSTAIFKSLISLKTRNAIFFSPHPRAKKSTIAAAKLILDAAVKAGAPKNIIGWIDEPSIELSQDLMSEADIILATGGPSMVKAAYSSGKPAIGVGAGNTPAIIDESADIDMAVSSIILSKTYDNGVICASEQSILVMNSIYEKVKAEFVKRGSYILNQNEIAKIKETMFKNGAINADIVGKSAYIIAKMAGIEVPQTTKILIGEVQSVEKSELFSHEKLSPVLAMYKVKDFDEALDKAQRLIELGGSGHTSSLYIDSQNNKDKVKEFGLAMKTSRTFINMPSSQGASGDLYNFAIAPSFTLGCGTWGGNSVSQNVEPKHLLNIKSVAERREKRPWFKVPQKIYFKYGCLRFALKELKDMNKKRAFIVTDKDLFKLGYVNKITKVLDEIDIKYSIFTDIKSDPTIDSVKKGAKEMLNFEPDTIISIGGGSPMDAAKVMHLLYEYPEAEIENLAINFMDIRKRICNFPKLGTKAISVAIPTTAGTGSEATPFAVITNDETGMKYPLTSYELTPNMAIIDTELMLNMPRKLTAATGIDALVHAIEAYVSVMATDYTDELALRAIKMIFKYLPRAYKNGTNDIEAREKMAHASNIAGMAFANAFLGVCHSMAHKLGAMHHVPHGIACAVLIEEVIKYNATDCPTKQTAFPQYKSPNAKRKYAEIAEYLNLKGTSDTEKVTALIEAISKLKIDLSIPQNISAAGINKKDFYNTLDKMSELAFDDQCTTANPRYPLISELKDIYIKSF

SEQ ID NO: 106 - protein, 858 aa, Artificial Sequence
  Synthetic Construct
MKVTNQKELKQKLNELREAQKKFATYTQEQVDKIFKQCAIAAAKLRINLAELAVEETGIGLVEDKIIKNHFAAEYIYNKYKNEKTCGIIDHDDSLGITKVAEPIGIVAAIVPTTNPTSTAIFKSLISLKTRNAIFFSPHPRAKKSTIAAAKLILDAAVKAGAPKNIIGWIDEPSIELSQDLMSEADIILATGGPSMVKAAYSSGKPAIGVGAGNTPAIIDESADIDMAVSSIILSKTYDNGVICASEQSILVMNSIYEKVKEEFVKRGSYILNQNEIAKIKETMFKNGAINADIVGKSAYIIAKMAGIEVPQTTKILIGEVQSVEKSELFSVEKLSPVLAMYKVKDFDEALKKAQRLIELGGSGHTSSLYIDSQNNKDKVKEFGLAMKTSRTFINMPSSQGASGDLYNFAIAPSFTLGCGTWGGNSVSQNVEPKHLLNIKSVAERREKRPWFKVPQKIYFKYGCLRFALKELKDMNKKRAFIVTDKDLFKLGYVNKITKVLDEIDIKYSIFTDIKSDPTIDSVKKGAKEMLNFEPDTIISIGGGSPMDAAKVMHLLYEYPEAEIENLAINFMDIRKRICNFPKLGTKAISVAIPTTAGTGSEATPFAVITNDETGMKYPLTSYELTPNMAIIDTELMLNMPRKLTAATGIDALVHAIEAYVSVMATDYTDELALRAIKMIFKYLPRAYKNGTNDIEAREKMAHASNIAGMAFANAFLGVCHSMAHKLGAMHHVPHGIACAVLIEEVIKYNATDCPTKQTAFPQYKSPNAKRKYAEIAEYLNLKGTSDTEKVTALIEAISKLKIDLSIPQNISAAGINKKDFYNTLDKMSELAFDDQCTTANPRYPLISELKDIYIKSF

SEQ ID NO: 107 - protein, 858 aa, Artificial Sequence
  Synthetic Construct
MKVTNQKELKQKLNELREAQKKFATCTQEQVDKIFKQCAIAAAKERINLAKLAVEETGIGLVEDKIIKNHFAAEYIYNKYKNGKTCGIIDHDDSLGITKVAEPIGIVAAIVPTTNPTSTAIFKSLISLKTRNAIFFSPHPRAKKSTIAAAKLILDAAVKAGAPKNIIGWIDEPSIELSQDLMSEADIILATGGPSMVKAAYSSGKPAIGVGAGNTPAIIDESADIDMAVSSIILSKTYDNGVICASEQSILVMNSIYEKVKEEFVKRGSYILNQNEIAKIKETMFKNGAINADIVGKSAYIIAKMAGIEVPQTTKILIGEVQSVEASELFSHEKLSPVLAMYKVKDFDEALKKAQRLIELGGSGHTSSLYIDSQNNKDKVKEFGLAMKTSRTFINMPSSQGASGDLYNFAIAPSFTLGCGTWGGNSVSQNVEPKHLLNIKSVAERREKRPWFKVPQKIYFKYGCLRFALKELKDMNKKRAFIVTDKDLFKLGYVNKITKVLDEIDIKYSIFTDIKSDPTIDSVKKGAKEMLNFEPDTIISIGGGSPMDAAKVMHLLYEYPEAEIENLAINFMDIRKRICNFPKLGTKAISVAIPTTAGTGSEATPFAVITNDETGMKYPLTSYELTPNMAIIDTELMLNMPRKLTAATGIDALVHAIEAYVSVMATDYTDELALRAIKMIFKYLPRAYKNGTNDIEAREKMAHASNIAGMAFANAFLGVCHSMAHKLGAMHHVPHGIACAVLIEEVIKYNATDCPTKQTAFPQYKSPNAKRKYAEIAEYLNLKGTSDTEKVTALIEAISKLKIDLSIPQNISAAGINKKDFYNTLDKMSELAFDDQCTTANPRYPLISELKDIYIKSF

SEQ ID NO: 108 - protein, 858 aa, Artificial Sequence
  Synthetic Construct
MKVTNQKELKQKDNELREAQKKFATYTQEQVDKIFKQCAIAAAKERINLAELAVEETGIGLVEDKIIKNHFAAEYIYNKYKNEKTCGIIDHDDSLGITKVAEPIGIVAAIVPTTNPTSTAIFKSLISLKTRNAIFFSPHPRAKKSTIAAAKLILDAAVKAGAPKNIIGWIDEPSIELSQDLMSEADIILATGGPSMVKAAYSSGKPAIGVGAGNTPAIIDESADIDMAVSSIILSKTYDNGVICASEQSILVMNSIYEKVKEEFVKRGSYILNQNEIAKIKETMFKNGAINADIVGKSAYIIAKMAGIEVPQTTKILIGEVQSVEKSELFSHEKLSPVLAMYKVKDFDEALKKAERLIELGGSGHTSSLYIDSQNNKDKVKEFGLAMKTSRTFINMPSSQGASGDLYNFAIAPSFTLGCGTWGGNSVSQNVEPKHLLNIVSVAERREKRPWFKVPQKIYFKYGCLRFALKELKDMNKKRAFIVTDKDLFKLGYVNKITKVLDEIDIKYSIFTDIKSDPTIDSVKKGAKEMLNFEPDTIISIGGGSPMDAAKVMHLLYEYPEAEIENLAINFMDIRKRICNFPKLGTKAISVAIPTTAGTGSEATPFAVITNDETGMKYPLTSYELTPNMAIIDTELMLNMPRKLTAATGIDALVHAIEAYVSVMATDYTDELALRAIKMIFKYLPRAYKNGTNDIEAREKMAHASNIAGMAFANAFLGVCHSMAHKLGAMHHVPHGIACAVLIEEVIKYNATDCPTKQTAFPQYKSPNAKRKYAEIAEYLNLKGTSDTEKVTALIEAISKLKIDLSIPQNISAAGINKKDFYNTLDKMSELAFDDQCTTANPRYPLISELKDIYIKSF

SEQ ID NO: 109 - protein, 858 aa, Artificial Sequence
  Synthetic Construct
MKVTNQKELKQKLNELREAQKKFATYTQAQVDKFFKQCAIAAAKERINLAKLAVEETGIGLVEDKIIKNHFAAEYIYNKYKNEKTCGIIDHDDSLGITKVAEPIGIVAAIVPTTNPTSTAIFKSLISLKTRNAIFFSPHPRAKKSTIAAAKLILDAAVKAGAPKNIIGWIDEPSIELSQDLMSEADIILATGGPSMVKAAYSSGKPAIGVGAGNTPAIIDESADIDMAVSSIILSKTYDNGVICASEQSILVMNSIYEKVKEEFVKRGSYILNQEEIAKIKETMFKNGAINADIVGKSAYIIAKMAGIEVPQFTKILIGEVQSVEKSELFSHEKLSPVLAMYKVKDFDEALKKAQRLIELGGSGHTSSLYIDSQNNKDKVKEFGLAMKTSRTFINMPSSQGASGDLYNFAIAPSFTLGCGTWGGNSVSQNVEPKHLLNIKSVAERREKRPWFKVPQKIYFKYGCLRFALKELKDMNKKRAFIVTDKDLFKLGYVNKITKVLDEIDIKYSIFTDIKSDPTIDSVKKGAKEMLNFEPDTIISIGGGSPMDAAKVMHLLYEYPEAEIENLAINFMDIRKRICNFPKLGTKAISVAIPTTAGTGSEATPFAVITNDETGMKYPLTSYELTPNMAIIDTELMLNMPRKLTAATGIDALVHAIEAYVSVMATDYTDELALRAIKMIFKYLPRAYKNGTNDIEAREKMAHASNIAGMAFANAFLGVCHSMAHKLGAMHHVPHGIACAVLIEEVIKYNATDCPTKQTAFPQYKSPNAKRKYAEIAEYLNLKGTSDTEKVTALIEAISKLKIDLSIPQNISAAGINKKDFYNTLDKMSELAFDDQCTTANPRYPLISELKDIYIKSF

SEQ ID NO: 110 - protein, 858 aa, Artificial Sequence
  Synthetic Construct
MKVTNQKELKQKLNELREAQKKFATYTQEQVEKIFKQCAIAAAKERINLAKLAVEETGIGLVEDKIIKNHFAAEYIYNKYKNEKTCGIIDHDDSLGITKVAEPIGIVAAIVPTTNPTSTAIFKSLISLKTRNAIFFSPHPRAKKSTIAAAKLILDAAVKAGAPKNIIGWIDEPSIELSQDLMSEADIILATGGPSMVKAAYSSGKPAIGVGAGNTPAIIDESADIDMAVSSIILSKTYDNGVICASEQSILVMNSIYEKVKEEFVKRGSYILNQQEIAKIKETMFKNGAINADIVGKSAYIIAKMAGIEVPQTTKILIGEVQDVEKSELFSHEKLSPVLAMYKVKDFDEALKKAQRLIELGGSGHTSSLYIDSQNNKDKVKEFGLEMKTSRTFINMPSSQGASGDLYNFAIAPSFTLGCGTWGGNSVSQNVEPKHLLNIKSVAERREKRPWFKVPQKIYFKYGCLRFALKELKDMNKKRAFIVTDKDLFKLGYVNKITKVLDEIDIKYSIFTDIKSDPTIDSVKKGAKEMLNFEPDTIISIGGGSPMDAAKVMHLLYEYPEAEIENLAINFMDIRKRICNFPKLGTKAISVAIPTTAGTGSEATPFAVITNDETGMKYPLTSYELTPNMAIIDTELMLNMPRKLTAATGIDALVHAIEAYVSVMATDYTDELALRAIKMIFKYLPRAYKNGTNDIEAREKMAHASNIAGMAFANAFLGVCHSMAHKLGAMHHVPHGIACAVLIEEVIKYNATDCPTKQTAFPQYKSPNAKRKYAEIAEYLNLKGTSDTEKVTALIEAISKLKIDLSIPQNISAAGINKKDFYNTLDKMSELAFDDQCTTANPRYPLISELKDIYIKSF

SEQ ID NO: 111 - protein, 858 aa, Artificial Sequence
  Synthetic Construct
MKVTNQKELKQKLNELREAQKKFNTYTQEQVDKIFKQCAIAAAKYRINLAKLAVEETGIGLVEDKIIKNHFAAEYIYNKYKNEKTCGIIDHDDSLGITKVAEPIGIVAAIVPTTNPTSTAIFKSLISLKTRNAIFFSPHPRAKKSTIAAAKLILDAAVKAGAPKNIIGWIDEPSIELSQDLMSEADIILATGGPSMVKAAYSSGKPAIGVGAGNTPAIIDESADIDMAVSSIILSKTYDNGVICASEQSILVMNSIYEKVKEEFVKRGSYILNQNAIAKIKETMFKNGAINADIVGKSAYIIAKMAGIEVPQTTKILIGEVQSVEKSELFSHEKLSPVLAMYKVKDFDEALKKAQRLIELGGSGHTSSLYIDSQNNKDKVKEFGLAMKTSRTFINMPSSQGASGDLYNFAIAPSFTLGCPTWGGNSVSQNVEPKHLLNIKSVAERREKRPWFKVPQKIYFKYGCLRFALKELKDMNKKRAFIVTDKDLFKLGYVNKITKVLDEIDIKYSIFTDIKSDPTIDSVKKGAKEMLNFEPDTIISIGGGSPMDAAKVMHLLYEYPEAEIENLAINFMDIRKRICNFPKLGTKAISVAIPTTAGTGSEATPFAVITNDETGMKYPLTSYELTPNMAIIDTELMLNMPRKLTAATGIDALVHAIEAYVSVMATDYTDELALRAIKMIFKYLPRAYKNGTNDIEAREKMAHASNIAGMAFANAFLGVCHSMAHKLGAMHHVPHGIACAVLIEEVIKYNATDCPTKQTAFPQYKSPNAKRKYAEIAEYLNLKGTSDTEKVTALIEAISKLKIDLSIPQNISAAGINKKDFYNTLDKMSELAFDDQCTTANPRYPLISELKDIYIKSF

SEQ ID NO: 112 - protein, 858 aa, Artificial Sequence
  Synthetic Construct
MKVTNQKELKQKLNELREAQKKFATYTQEQVDKIFKQCAIAAAKERINLAKLAVEETGIGLVEDKIIKNHFAAEYIYNKYKNEKTCGIIDHDDSLGITKVAEPIGIVAAIVPTTNPTSTAIFKSLISLKTRNAIFFSPHPRAKKSTIAAAKLILDAAVKAGAPKNIIGWIDEPSIELSQDLMSEADIILATGGPSMVKAAYSSGKPAIGAGAGNTPAIIDESADIDMAVSSIILSKTYDNGVICASEQSILVMNSIYEKVKEEFVKRGSYILNQQEIAKIKETMFKNGAINADIVGKSAYIIAKMAGIEVPQTTKILIGEVQSVEKSELFSEEKLSPVLAMYKVKDFDEALKKAQRLIELGGSGHTSSLYIDSQNNKDKVKEFGLAMKTSRTFINMPSSQGASGDLYNFAIAPSFTLGCGTWGGNSVSQNVEPKHLLNIKSVARRREKRPWFKVPQKIYFKYGCLRFALKELKDMNKKRAFIVTDKDLFKLGYVNKITKVLDEIDIKYSIFTDIKSDPTIDSVKKGAKEMLNFEPDTIISIGGGSPMDAAKVMHLLYEYPEAEIENLAINFMDIRKRICNFPKLGTKAISVAIPTTAGTGSEATPFAVITNDETGMKYPLTSYELTPNMAIIDTELMLNMPRKLTAATGIDALVHAIEAYVSVMATDYTDELALRAIKMIFKYLPRAYKNGTNDIEAREKMAHASNIAGMAFANAFLGVCHSMAHKLGAMHHVPHGIACAVLIEEVIKYNATDCPTKQTAFPQYKSPNAKRKYAEIAEYLNLKGTSDTEKVTALIEAISKLKIDLSIPQNISAAGINKKDFYNTLDKMSELAFDDQCTTANPRYPLISELKDIYIKSF

SEQ ID NO: 113 - protein, 858 aa, Artificial Sequence
  Synthetic Construct
MKVTNQKELKQKLNELREAQKKFATYTQEQVDKIFKQCAIAAAKERINLAKLAVEETGIGLVEDKIIKNHFAAEYIYNKYKNEKTCGIIDHDDSLGITKVAEPIGIVAAIVPTTNPTSTAIFKSLISLKTRNAIFFSPHPRAKKSTIAAATLILDAAVKAGAPKNIIGWIDEPSIELSQDLMSEADIILATGGPSMVKAAYSSGKPAIGVGAGNTPAIIDESADIDMAVSSIILSKTYDNGVICASEQSILVMNSIYEKVKAEFVKRGSYILNQNEIAKIKETMFKNGAINADIVGKSAYIIAKMAGIEVPQTTKILIGEVQSVEKSELFSKEKLSPVLAMYKVKDFDEALKKAQRLINLGGSGHTSSLYIDSQNNKDKVKEFGLAMKTSRTFINMPSSQGASGDLYNFAIAPSFTLGCGTWGGNSVSQNVEPKHLLNIKSVAERREKRPWFKVPQKIYFKYGCLRFALKELKDMNKKRAFIVTDKDLFKLGYVNKITKVLDEIDIKYSIFTDIKSDPTIDSVKKGAKEMLNFEPDTIISIGGGSPMDAAKVMHLLYEYPEAEIENLAINFMDIRKRICNFPKLGTKAISVAIPTTAGTGSEATPFAVITNDETGMKYPLTSYELTPNMAIIDTELMLNMPRKLTAATGIDALVHAIEAYVSVMATDYTDELALRAIKMIFKYLPRAYKNGTNDIEAREKMAHASNIAGMAFANAFLGVCHSMAHKLGAMHHVPHGIACAVLIEEVIKYNATDCPTKQTAFPQYKSPNAKRKYAEIAEYLNLKGTSDTEKVTALIEAISKLKIDLSIPQNISAAGINKKDFYNTLDKMSELAFDDQCTTANPRYPLISELKDIYIKSF

SEQ ID NO: 114 - protein, 858 aa, Artificial Sequence
  Synthetic Construct
MKVTNQKELKQKLNELREAQKKFATYTQEQVDKIFKQCAIAAAKERINLAKLAVEETGIGLVEDKIIKNHFAAEYIYNKYKNEKTCGIIDHDDSLGITKVAEPIGIVAAIVPTTNPTSTAIFKSLISLKTRNAIFFSPHPRAKKSTIAAAKLILDAAVKAGAPKNIIGWIDEPSIELSQDLMSEADIILATGGPSMVKAAYSSGKPAIGVGAGNTPAIIDESADIDMAVSSIILSKTYDNGVICASEQSILVMNSIYEKVKEEFVKRGSYILNQNEIAKIKETMFKNGAINRDIVGKSAYIIAKMAGIEVPQFTKILIGEVQDVEKSELFSHEKLSPVLAMYKVKDFDEALKKAQRLIELGGSGHTSSLYIDSQNNKDKVKEFGLAMKTSRTFINMPSSQGASGDLYNFAIAPSFTLGCGTWGGNSVSQNVEPKHLLNIKSVARRREKRPWFKVPQKIYFKYGCLRFALKELKDMNKKRAFIVTDKDLFKLGYVNKITKVLDEIDIKYSIFTDIKSDPTIDSVKKGAKEMLNFEPDTIISIGGGSPMDAAKVMHLLYEYPEAEIENLAINFMDIRKRICNFPKLGTKAISVAIPTTAGTGSEATPFAVITNDETGMKYPLTSYELTPNMAIIDTELMLNMPRKLTAATGIDALVHAIEAYVSVMATDYTDELALRAIKMIFKYLPRAYKNGTNDIEAREKMAHASNIAGMAFANAFLGVCHSMAHKLGAMHHVPHGIACAVLIEEVIKYNATDCPTKQTAFPQYKSPNAKRKYAEIAEYLNLKGTSDTEKVTALIEAISKLKIDLSIPQNISAAGINKKDFYNTLDKMSELAFDDQCTTANPRYPLISELKDIYIKSF

SEQ ID NO: 115 - protein, 858 aa, Artificial Sequence
  Synthetic Construct
MKVTNQKELKQKLNELREAQKKFATMTQEQVDKIFKQCAIAAAKERINLAKLAVEETGIGLVEDKIIKNHFAAEYIYNKYKNEKTCGIIDHDDSLGITKVAEPIGIVAAIVPTTNPTSTAIFKSLISLKTRNAIFFSPHPRAKKSTIAAAKLILDAAVKAGAPKNIIGWIDEPSIELSQDLMSEADIILATGGPSMVKAAYSSGKPAIGVGAGNTPAIIDESADIDMAVSSIILSKTYDNNVICASEQSILVMNSIYEKVKEEFVKRGSYILNQNEIAKIKETMFKNGAINRDIVGKSAYIIAKMAGIEVPQTTKILIGEVQSVEKSELFSVEKLSPVLAMYKVKDFDEALKKAQRLIELGGSGHTSSLYIDSQNNKDKVKEFGLAMKTSRTFINMPSSQGASGDLYNFAIAPSFTLGCGTWGGNSVSQNVEPKHLLNIKSVAERREKRPWFKVPQKIYFKYGCLRFALKELKDMNKKRAFIVTDKDLFKLGYVNKITKVLDEIDIKYSIFTDIKSDPTIDSVKKGAKEMLNFEPDTIISIGGGSPMDAAKVMHLLYEYPEAEIENLAINFMDIRKRICNFPKLGTKAISVAIPTTAGTGSEATPFAVITNDETGMKYPLTSYELTPNMAIIDTELMLNMPRKLTAATGIDALVHAIEAYVSVMATDYTDELALRAIKMIFKYLPRAYKNGTNDIEAREKMAHASNIAGMAFANAFLGVCHSMAHKLGAMHHVPHGIACAVLIEEVIKYNATDCPTKQTAFPQYKSPNAKRKYAEIAEYLNLKGTSDTEKVTALIEAISKLKIDLSIPQNISAAGINKKDFYNTLDKMSELAFDDQCTTANPRYPLISELKDIYIKSF

SEQ ID NO: 116 - protein, 858 aa, Artificial Sequence
  Synthetic Construct
MKVTNQKELKQKLNELREAQKKFATYTQEQVDKIFKQCAIAAAKERINLAKLAVEETGIGLVEDKIIKNHFAAEYIYNKYKNEKTCGIIDHDDSLGITKVAEPIGIVASIVPTTNPTSTAIFKSLISLKTRNAIFFSPHPRAKKSTIAAAKLILDAAVKAGAPKNIIGWIDEPSIELSQDMMSEADIILATGGPSMVKAAYSSGKPAIGVGAGNTPAIIDESADIDMAVSSIILSKTYDNGVICASEQSILVMNSIYEKVKKEFVKRGSYILNQNEIAKIKETMFKNGAINADIVGKSAYIIAKMAGIEVPQTTKILIGEVQSVEKSELFSHEKLSPVLAMYKVKDFDEALKKAQRLIELGGSHHTSSLYIDSQNNKDKVKEFGLAMKTSRTFINMPSSQGASGDLYNFAIAPSFTLGCGTWGGNSVSQNVEPKHLLNIKSVAERREKRPWFKVPQKIYFKYGCLRFALKELKDMNKKRAFIVTDKDLFKLGYVNKITKVLDEIDIKYSIFTDIKSDPTIDSVKKGAKEMLNFEPDTIISIGGGSPMDAAKVMHLLYEYPEAEIENLAINFMDIRKRICNFPKLGTKAISVAIPTTAGTGSEATPFAVITNDETGMKYPLTSYELTPNMAIIDTELMLNMPRKLTAATGIDALVHAIEAYVSVMATDYTDELALRAIKMIFKYLPRAYKNGTNDIEAREKMAHASNIAGMAFANAFLGVCHSMAHKLGAMHHVPHGIACAVLIEEVIKYNATDCPTKQTAFPQYKSPNAKRKYAEIAEYLNLKGTSDTEKVTALIEAISKLKIDLSIPQNISAAGINKKDFYNTLDKMSELAFDDQCTTANPRYPLISELKDIYIKSF

SEQ ID NO: 117 - protein, 858 aa, Artificial Sequence
  Synthetic Construct
MKVTNQKELKQKLNELREAQKKFATYTQEQVDKIFKQCAIAAAKERINLAKLAVEETGIGLVEDKIIKNHFAAEYIYNKYKNEKTCGIIDHDDSLGITKVAEPIGIVAAIVPTTNPTSTAIFKSLISLKTRNAIFFSPHPRAKKSTIAAAKLILDAAVKAGAPKNIIGWIDEPSIELSQDLMSEADIILATGGPSMVKAAYSSGKPAIGVGAGNTPAIIDESADIDMAVSSIILSATYDNGVICASEQSILVMNSIYEKVKEEFVKRGSYILNQNEIAKIKETMFKNGAINADIVGKSAYIIAKMAGIEVPQTTKILIGEVQSVEASELFSKEKLSPVLAMYKVKDFDEALKLAQRLIELGGSGHTSSLYIDSQNNKDKVKEFGLAMKTSRTFINMPSSQGASGDLYNFAIAPSFTLGCGTWGGNSVSQNVEPKHLLNIKSVAERREKRPWFKVPQKIYFKYGCLRFALKELKDMNKKRAFIVTDKDLFKLGYVNKITKVLDEIDIKYSIFTDIKSDPTIDSVKKGAKEMLNFEPDTIISIGGGSPMDAAKVMHLLYEYPEAEIENLAINFMDIRKRICNFPKLGTKAISVAIPTTAGTGSEATPFAVITNDETGMKYPLTSYELTPNMAIIDTELMLNMPRKLTAATGIDALVHAIEAYVSVMATDYTDELALRAIKMIFKYLPRAYKNGTNDIEAREKMAHASNIAGMAFANAFLGVCHSMAHKLGAMHHVPHGIACAVLIEEVIKYNATDCPTKQTAFPQYKSPNAKRKYAEIAEYLNLKGTSDTEKVTALIEAISKLKIDLSIPQNISAAGINKKDFYNTLDKMSELAFDDQCTTANPRYPLISELKDIYIKSF

SEQ ID NO: 118 - protein, 858 aa, Artificial Sequence
  Synthetic Construct
MKVTNQKELKQKLNELREAQKKFATYTQEQVDKIFKQCAIAAAKERINLAKLAVEETGIGLVEDKIIKNHFAAEYIYNKYKNEKTCGIIDHDDSLGITKVAEPIGIVAAIVPTTNPTSTAIFKSLISLKTRNAIFFSPHPRAKKSTIAAAKLILDAAVKAGAPKNIIGWIDEPSIELSQDLMSEADIILATGGPSMVKAAYSSGKPAIGVGAGNTPAIIDESADIDMAVSSIILSKTYDNGVICASEQSILVMNSIYEKVKEEFVKRGSYILNQNEIAKIKETMFKNGAINADIVGKSAYIIAKMAGIEVPQTTKILIGEVQSVEASELFSHEKLSPVLAMYKVKDFDEALKKAQRLINLGGSHHTSSLYIDSQNNKDKVKEFGLAMKTSRTFINMPSSQGASGDLYNFAIAPSFTLGCGTWGGNSVSQNVEPKHLLNIVSVAERREKRPWFKVPQKIYFKYGCLRFALKELKDMNKKRAFIVTDKDLFKLGYVNKITKVLDEIDIKYSIFTDIKSDPTIDSVKKGAKEMLNFEPDTIISIGGGSPMDAAKVMHLLYEYPEAEIENLAINFMDIRKRICNFPKLGTKAISVAIPTTAGTGSEATPFAVITNDETGMKYPLTSYELTPNMAIIDTELMLNMPRKLTAATGIDALVHAIEAYVSVMATDYTDELALRAIKMIFKYLPRAYKNGTNDIEAREKMAHASNIAGMAFANAFLGVCHSMAHKLGAMHHVPHGIACAVLIEEVIKYNATDCPTKQTAFPQYKSPNAKRKYAEIAEYLNLKGTSDTEKVTALIEAISKLKIDLSIPQNISAAGINKKDFYNTLDKMSELAFDDQCTTANPRYPLISELKDIYIKSF

SEQ ID NO: 119 - protein, 858 aa, Artificial Sequence
  Synthetic Construct
MKVTNQKELKQKLNELREAQKKFASYTQEQVDKIFKQCAIAAAKERINLAKLAVEETGIGLVEDKIIKNHFAAEYIYNKYKNEKTCGIIDHDDSLGITKVAEPIGIVAAIVPTTNPTSTAIFKSLISLKTRNAIFFSPHPRAKKSTIAAAKLILDAAVKAGAPKNIIGWIDEPSIELSQDLMSEADIILATGGPSMVKAAYSSGKKAIGVGAGNTPAIIDESADIDMAVSSIILSKTYDNGVICASEQSILVMNSIYEKVKEEFVKRGSYILNQNEIAKIKETMFKNGAINADIVGKSAYIIAKMAGIEVPQYTKILIGEVQSVEKSELFSHEKLSPVLAMYKVKDFDEALKKAQRLIELGGSGHTSSLYIDSQNNKDKVKEFGLAMKTSRFFINMPSSQGASGDLYNFAIAPSFTLGCGTWGGNSVSQNVEPKHLLNIKSVAERREKRPWFKVPQKIYFKYGCLRFALKELKDMNKKRAFIVTDKDLFKLGYVNKITKVLDEIDIKYSIFTDIKSDPTIDSVKKGAKEMLNFEPDTIISIGGGSPMDAAKVMHLLYEYPEAEIENLAINFMDIRKRICNFPKLGTKAISVAIPTTAGTGSEATPFAVITNDETGMKYPLTSYELTPNMAIIDTELMLNMPRKLTAATGIDALVHAIEAYVSVMATDYTDELALRAIKMIFKYLPRAYKNGTNDIEAREKMAHASNIAGMAFANAFLGVCHSMAHKLGAMHHVPHGIACAVLIEEVIKYNATDCPTKQTAFPQYKSPNAKRKYAEIAEYLNLKGTSDTEKVTALIEAISKLKIDLSIPQNISAAGINKKDFYNTLDKMSELAFDDQCTTANPRYPLISELKDIYIKSF

SEQ ID NO: 120 - protein, 858 aa, Artificial Sequence
  Synthetic Construct
MKVTNQKELKQKLNELREAQKKFATYTQEQVDKIFKQCAIAAAKERINLAKLAVEETGIGLVEDKIIKNHFAAEYIYNKYKNEKTCGIIDHDDSLGITKVAEPIGIVAAIVPTTNPTSTAIFKSLISLKTRNAIFFSPHPRAKKSTIAAAKLILDAAVKAGAPKNIIGWIDEPSIELSQDLMSEADIILATGGPSMVKAAYSSGKPAIGVGAGNTPAIIDESADIDMAVSSIILSKTYDNGVICASEQSILVMNSIYEKVKEEFVKRGSYILNQNEIAKIKETMFKNGAINADIVGKSAYIIAKMAGIEVPQYTKILIGEVQSVEKSELFSVEKLSPVLAMYKVKDFDEALKLAQRLIHLGGSGHTSSLYIDSQNNKDKVKEFGLAMKTSRTFINMPSSQGASGDLYNFAIAPSFTLGCGTWGGNSVSQNVEPKHLLNIKSVAERREKRPWFKVPQKIYFKYGCLRFALKELKDMNKKRAFIVTDKDLFKLGYVNKITKVLDEIDIKYSIFTDIKSDPTIDSVKKGAKEMLNFEPDTIISIGGGSPMDAAKVMHLLYEYPEAEIENLAINFMDIRKRICNFPKLGTKAISVAIPTTAGTGSEATPFAVITNDETGMKYPLTSYELTPNMAIIDTELMLNMPRKLTAATGIDALVHAIEAYVSVMATDYTDELALRAIKMIFKYLPRAYKNGTNDIEAREKMAHASNIAGMAFANAFLGVCHSMAHKLGAMHHVPHGIACAVLIEEVIKYNATDCPTKQTAFPQYKSPNAKRKYAEIAEYLNLKGTSDTEKVTALIEAISKLKIDLSIPQNISAAGINKKDFYNTLDKMSELAFDDQCTTANPRYPLISELKDIYIKSF

SEQ ID NO: 121 - protein, 858 aa, Artificial Sequence
  Synthetic Construct
MKVTNQKELKQKLNELREAQKKFATCTQEQVDKIFKQCAIAAAKERINLAKLAVEETGIGLVEDKIIKNHFAAEYIYNKEKNEKTCGIIDHDDSLGITKVAEPIGIVAAIVPTTNPTSTAIFKSLISLKTRNAIFFSPHPRAKKSTIAAAKLILDAAVKAGAPKNIIGWIDEPSIELSQDLMSEADIILATGGPSMVKAAYSSGKPAIGVGAGNTPAIIDESADIDMAVSSIILSKTYDNGVICASEQSILVMNSIYEKVKEEFVKRGSYILNQNEIAKIKETMFKNGAINADIVGKSAYIIAKMAGIEVPQTTKILIGEVQSVEKSELFSHEKLSPVLAMYKVKDFDEALDKAQRLIELGGSGHTSSLYIDSQNNKDKVKEFGLRMKTSRTFINMPSSQGASGDLYNFAIAPSFTLGCGTWGGNSVSQNVEPKHLLNIKSVAERREKRPWFKVPQKIYFKYGCLRFALKELKDMNKKRAFIVTDKDLFKLGYVNKITKVLDEIDIKYSIFTDIKSDPTIDSVKKGAKEMLNFEPDTIISIGGGSPMDAAKVMHLLYEYPEAEIENLAINFMDIRKRICNFPKLGTKAISVAIPTTAGTGSEATPFAVITNDETGMKYPLTSYELTPNMAIIDTELMLNMPRKLTAATGIDALVHAIEAYVSVMATDYTDELALRAIKMIFKYLPRAYKNGTNDIEAREKMAHASNIAGMAFANAFLGVCHSMAHKLGAMHHVPHGIACAVLIEEVIKYNATDCPTKQTAFPQYKSPNAKRKYAEIAEYLNLKGTSDTEKVTALIEAISKLKIDLSIPQNISAAGINKKDFYNTLDKMSELAFDDQCTTANPRYPLISELKDIYIKSF

SEQ ID NO: 122 - protein, 858 aa, Artificial Sequence
  Synthetic Construct
MKVTNQKELKQKLNELREAQKKFATYTQEQVDKIFKQCAIAAAKLRINLAKLAVEETGIGLVEDKIIKNHFAAEYIYNKYKNEKTCGIIDHDDSLGITKVAEPIGIVAAIVPTTNPTSTAIFKSLISLKTRNAIFFSPHPRAKKSTIAAAKLILDAAVKAGAPKNIIGWIDEPSIELSQDLMSEADIILATGGPSMVKAAYSSGKPAIGVGAGNTPAIIDESADIDMAVSSIILSKTYDNGVICASEQSILVMNSIYEKVKEEFVKRGSYILNQNEIAKIKETMFKNGAINADIVGKSAYIIAKMAGIEVPQTTKILIGEVQSVEKSELFSHEKLSPVLAMYKVKDFDEALKKAERLIELGGSGHTSSLYIDSQNNKDKVKEFGLRMKTSRTFINMPSSQGASGDLYNFAIAPSFTLACGTWGGNSVSQNVEPKHLLNIKSVAERREKRPWFKVPQKIYFKYGCLRFALKELKDMNKKRAFIVTDKDLFKLGYVNKITKVLDEIDIKYSIFTDIKSDPTIDSVKKGAKEMLNFEPDTIISIGGGSPMDAAKVMHLLYEYPEAEIENLAINFMDIRKRICNFPKLGTKAISVAIPTTAGTGSEATPFAVITNDETGMKYPLTSYELTPNMAIIDTELMLNMPRKLTAATGIDALVHAIEAYVSVMATDYTDELALRAIKMIFKYLPRAYKNGTNDIEAREKMAHASNIAGMAFANAFLGVCHSMAHKLGAMHHVPHGIACAVLIEEVIKYNATDCPTKQTAFPQYKSPNAKRKYAEIAEYLNLKGTSDTEKVTALIEAISKLKIDLSIPQNISAAGINKKDFYNTLDKMSELAFDDQCTTANPRYPLISELKDIYIKSF

SEQ ID NO: 123 - protein, 858 aa, Artificial Sequence
  Synthetic Construct
MKVTNQKELKQKLNELREAQKKFATYTQEQVDKIFKQCAIAAAKERINLAKLAVEETGIGLVEDKIIKNHFAAEYIYNKYKNEKTCGIIDHDDSLGITKVAEPIGIVAAIVPTTNPTSTAIFKSLISLKTRNAIFFSPHPRAKKSTIAAAKLILDAAVKAGAPKNIIGWIDEPSIELSQDLMSEADIILATGGPSMVKAAYSSGKPAIGVGAGNTPAIIDESADIDMAVSSIILGKTYDNGVICASEQSILVMNSIYEKVKAEFVKRGSYILNQNEIAKIKETMFKNGAINADIVGKSAYIIAKMAGIEVPQTTKILIGEVQHVEKSELFSHEKLSPVLAMYKVKDFDEALKKAQRLIELGGSGHTSSLYIDSQNNKDKVKEFGLAMKTSITFINMPSSQGASGDLYNFAIAPSFTLGCGTWGGNSVSQNVEPKHLLNIKSVAERREKRPWFKVPQKIYFKYGCLRFALKELKDMNKKRAFIVTDKDLFKLGYVNKITKVLDEIDIKYSIFTDIKSDPTIDSVKKGAKEMLNFEPDTIISIGGGSPMDAAKVMHLLYEYPEAEIENLAINFMDIRKRICNFPKLGTKAISVAIPTTAGTGSEATPFAVITNDETGMKYPLTSYELTPNMAIIDTELMLNMPRKLTAATGIDALVHAIEAYVSVMATDYTDELALRAIKMIFKYLPRAYKNGTNDIEAREKMAHASNIAGMAFANAFLGVCHSMAHKLGAMHHVPHGIACAVLIEEVIKYNATDCPTKQTAFPQYKSPNAKRKYAEIAEYLNLKGTSDTEKVTALIEAISKLKIDLSIPQNISAAGINKKDFYNTLDKMSELAFDDQCTTANPRYPLISELKDIYIKSF

SEQ ID NO: 124 - protein, 858 aa, Artificial Sequence
  Synthetic Construct
MKVTNQKELKQKLNELREAQKKFATYTQEQVDKIFKQCAIAAAKERINLAKLAVEETGIGLVEDKIIKNHFAAEYIYNKYKNEKTCGIIDHDDSLGITKVAEPIGIVAAIVPTTNPTSTAIFKSLISLKTRNAIFFSPHPRAKKSTIAAAKLILDAAVKAGAPKNIIGWIDEPSIELSQDLMSEADIILATGGPSMVKAAYSSGKPAIGVGAGNTPAIIDESADIDMAVSSIILSATYDNGVICASEQSILVMNSIYEKVKEEFVKRGSYILNQNEIAKIKETMFKNGAINADIVGKSAYIIAKMAGIEVPQTTKILIGEVQSVEKSELFSHELLSPVLAMYKVKDFDEALKKAQRLIHLGGSGHTSSLYIDSQNNKDKVKEFGLAMKTSITFINMPSSQGASGDLYNFAIAPSFTLGCGTWGGNSVSQNVEPKHLLNIKSVAERREKRPWFKVPQKIYFKYGCLRFALKELKDMNKKRAFIVTDKDLFKLGYVNKITKVLDEIDIKYSIFTDIKSDPTIDSVKKGAKEMLNFEPDTIISIGGGSPMDAAKVMHLLYEYPEAEIENLAINFMDIRKRICNFPKLGTKAISVAIPTTAGTGSEATPFAVITNDETGMKYPLTSYELTPNMAIIDTELMLNMPRKLTAATGIDALVHAIEAYVSVMATDYTDELALRAIKMIFKYLPRAYKNGTNDIEAREKMAHASNIAGMAFANAFLGVCHSMAHKLGAMHHVPHGIACAVLIEEVIKYNATDCPTKQTAFPQYKSPNAKRKYAEIAEYLNLKGTSDTEKVTALIEAISKLKIDLSIPQNISAAGINKKDFYNTLDKMSELAFDDQCTTANPRYPLISELKDIYIKSF

SEQ ID NO: 125 - protein, 858 aa, Artificial Sequence
  Synthetic Construct
MKVTNQKELKQKLNELREAQKKFATYTQEQVDKIFKQCAIAAAKERINLAKLAVEETGIGLVEDKIIKNHFAAEYIYNKYKNEKTCGIIDHDDSLGITKVAEPIGIVAAIVPTTNPTSTAIFKSLISLKTRNAIFFSPHPRAKKSTIAAAKLILDAAVKAGAPKNIIGWIDEPSIELSQDLMSEADIILATGGPSMVKAAYSSGKKAIGVGAGNTPAIIDESADIDMAVSSIILSKTYDNGVICASEQSILVMNSIYEKVKKEFVKRGSYILNQNAIAKIKETMFKNGAINADIVGKSAYIIAKMAGIEVPQTTKILIGEVQSVEKSELFSHELLSPVLAMYKVKDFDEALKKAQRLIELGGSGHTSSLYIDSQNNKDKVKEFGLAMKTSRTFINMPSSQGASGDLYNFAIAPSFTLGCGTWGGNSVSQNVEPKHLLNIKSVAERREKRPWFKVPQKIYFKYGCLRFALKELKDMNKKRAFIVTDKDLFKLGYVNKITKVLDEIDIKYSIFTDIKSDPTIDSVKKGAKEMLNFEPDTIISIGGGSPMDAAKVMHLLYEYPEAEIENLAINFMDIRKRICNFPKLGTKAISVAIPTTAGTGSEATPFAVITNDETGMKYPLTSYELTPNMAIIDTELMLNMPRKLTAATGIDALVHAIEAYVSVMATDYTDELALRAIKMIFKYLPRAYKNGTNDIEAREKMAHASNIAGMAFANAFLGVCHSMAHKLGAMHHVPHGIACAVLIEEVIKYNATDCPTKQTAFPQYKSPNAKRKYAEIAEYLNLKGTSDTEKVTALIEAISKLKIDLSIPQNISAAGINKKDFYNTLDKMSELAFDDQCTTANPRYPLISELKDIYIKSF

SEQ ID NO: 126 - protein, 858 aa, Artificial Sequence
  Synthetic Construct
MKVTNQKELKQKLNELREAQKKFATYTQEQVDKIFKQCAIAAAKERINLAKLAVEETGIGLVEDKIIKNHFAAEYIYNKYKNEKTCGIIDHDDSLGITKVAEPIGIVAAIVPTTNPTSTAIFKSLISLKTRNAIFFSPHPRAKKSTIAAAKLILDAAVKAGAPKNIIGWIDEPSIELSQDLMKEADIILATGGPSMVKAAYSSGKPAIGVGAGNTPAIIDESADIDMAVSSIILSKTYDNGVICASEQSILVMNSIYEKVKEEFVKRGSYILNQNEIAKIKETMFKNGAINADIVGKSAYIIAKMAGIEVPQTTKILIGEVQSVEKSELFSEEKLSPVLAMYKVKDFDEALKKAQRLIELGGSGHTSSLYIDSQNNKDKVKEFGLEMKTSRTFINMPSSQGASGDLYNFAIAPSFTLGCGTWEGNSVSQNVEPKHLLNIKSVAERREKRPWFKVPQKIYFKYGCLRFALKELKDMNKKRAFIVTDKDLFKLGYVNKITKVLDEIDIKYSIFTDIKSDPTIDSVKKGAKEMLNFEPDTIISIGGGSPMDAAKVMHLLYEYPEAEIENLAINFMDIRKRICNFPKLGTKAISVAIPTTAGTGSEATPFAVITNDETGMKYPLTSYELTPNMAIIDTELMLNMPRKLTAATGIDALVHAIEAYVSVMATDYTDELALRAIKMIFKYLPRAYKNGTNDIEAREKMAHASNIAGMAFANAFLGVCHSMAHKLGAMHHVPHGIACAVLIEEVIKYNATDCPTKQTAFPQYKSPNAKRKYAEIAEYLNLKGTSDTEKVTALIEAISKLKIDLSIPQNISAAGINKKDFYNTLDKMSELAFDDQCTTANPRYPLISELKDIYIKSF

SEQ ID NO: 127 - protein, 858 aa, Artificial Sequence
  Synthetic Construct
MKVTNQKELKQKLNELREAQKKFATYTQDQVDKIFKQCAIAAAKERINLAKLAVEETGIGLVEDKIIKNHFAAEYIYNKYKNEKTCGIIDHDDSLGITKVAEPIGIVAAIVPTTNPTSTAIFKSLISLKTRNAIFFSPHPRAKKSTIAAAKLILDAAVKAGAPKNIIGWIDEPSIELSQDLMSEADIILATGGPSMVKAAYSSGKPAIGVGAGNTPAIIDESADIDMAVSSIILSKTYDNGVICASEQSILVMNSIYEKVKEEFVKRGSYILNQNEIAKIKETMFKNGAINADIVGKSAYIIAKMAGIEVPQTTKILIGEVQHVEKSELFSHEKLSPVLAMYKVKDFDEALDKAQRLIELGGSGHTSSLYSDSQNNKDKVKEFGLAMKTSRTFINMPSSQGASGDLYNFAIAPSFTLGCGTWGGNSVSQNVEPKHLLNIKSVAERREKRPWFKVPQKIYFKYGCLRFALKELKDMNKKRAFIVTDKDLFKLGYVNKITKVLDEIDIKYSIFTDIKSDPTIDSVKKGAKEMLNFEPDTIISIGGGSPMDAAKVMHLLYEYPEAEIENLAINFMDIRKRICNFPKLGTKAISVAIPTTAGTGSEATPFAVITNDETGMKYPLTSYELTPNMAIIDTELMLNMPRKLTAATGIDALVHAIEAYVSVMATDYTDELALRAIKMIFKYLPRAYKNGTNDIEAREKMAHASNIAGMAFANAFLGVCHSMAHKLGAMHHVPHGIACAVLIEEVIKYNATDCPTKQTAFPQYKSPNAKRKYAEIAEYLNLKGTSDTEKVTALIEAISKLKIDLSIPQNISAAGINKKDFYNTLDKMSELAFDDQCTTANPRYPLISELKDIYIKSF

SEQ ID NO: 128 - protein, 858 aa, Artificial Sequence
  Synthetic Construct
MKVTNQKELKQKLNELREAQKKFLTYTQEQVDKIFKQCAIAAAKERINLAKLAVEETGIGLVEDKIIKNHFAAEYIYNKYKNEKTCGIIDHDDSLGITKVAEPIGIVAAIVPTTNPTSTAIFKSLISLATRNAIFFSPHPRAKKSTIAAAKLILDAAVKAGAPKNIIGWIDEPSIELSQDLMSEADIILATGGPSMVKAAYSSGKPAIGVGAGNTPAIIDESADIDMAVSSIILGKTYDNGVICASEQSILVMNSIYEKVKEEFVKRGSYILNQNEIAKIKETMFKNGAINADIVGKSAYIIAKMAGIEVPQTTKILIGEVQSVEKSELFSHEKLSPVLAMYKVKDFDEALKKAQRLIELGGSGHTSSLYIDSQNNKDKVKEFGLAMKTSRTFINMPSSQGASGDLYNFAIAPSFTLACGTWGGNSVSQNVEPKHLLNIKSVAERREKRPWFKVPQKIYFKYGCLRFALKELKDMNKKRAFIVTDKDLFKLGYVNKITKVLDEIDIKYSIFTDIKSDPTIDSVKKGAKEMLNFEPDTIISIGGGSPMDAAKVMHLLYEYPEAEIENLAINFMDIRKRICNFPKLGTKAISVAIPTTAGTGSEATPFAVITNDETGMKYPLTSYELTPNMAIIDTELMLNMPRKLTAATGIDALVHAIEAYVSVMATDYTDELALRAIKMIFKYLPRAYKNGTNDIEAREKMAHASNIAGMAFANAFLGVCHSMAHKLGAMHHVPHGIACAVLIEEVIKYNATDCPTKQTAFPQYKSPNAKRKYAEIAEYLNLKGTSDTEKVTALIEAISKLKIDLSIPQNISAAGINKKDFYNTLDKMSELAFDDQCTTANPRYPLISELKDIYIKSF

SEQ ID NO: 129 - protein, 858 aa, Artificial Sequence
  Synthetic Construct
MKVTNQKELKQKLNELREAQKKFATYTQEQVDKIFKQCAIAAAKERINLAKLAVEETGIGLVEDKIIKNHFAAEYIYNKYKNHKTCGIIDHDDSLGITKVAEPIGIVAAIVPTTNPTSTAIFKSLISLKTRNAIFFSPHPRAKKSTIAAAKLILDAAVKAGAPKNIIGWIDEPSIELSQDLMSEADIILATGGPSMVKAAYSSGKPAIGVGAGNTPAIIDESADIDMAVSSIILSKTYDNNVICASEQSILVMNSIYEKVKEEFVKRGSYILNQNEIAKIKETMFKNGAINADIVGKSAYIIAKMAGIEVPQTTKILIGEVQSVEKSELFSHEKLSPVLAMYKVKDFDEALKKAQRLIELGGSGHTSSLYIDSQNNKDKVKEFGLAMKTSRFFINMPSSQGASGDLYNFAIAPSFTLGCPTWGGNSVSQNVEPKHLLNIKSVAERREKRPWFKVPQKIYFKYGCLRFALKELKDMNKKRAFIVTDKDLFKLGYVNKITKVLDEIDIKYSIFTDIKSDPTIDSVKKGAKEMLNFEPDTIISIGGGSPMDAAKVMHLLYEYPEAEIENLAINFMDIRKRICNFPKLGTKAISVAIPTTAGTGSEATPFAVITNDETGMKYPLTSYELTPNMAIIDTELMLNMPRKLTAATGIDALVHAIEAYVSVMATDYTDELALRAIKMIFKYLPRAYKNGTNDIEAREKMAHASNIAGMAFANAFLGVCHSMAHKLGAMHHVPHGIACAVLIEEVIKYNATDCPTKQTAFPQYKSPNAKRKYAEIAEYLNLKGTSDTEKVTALIEAISKLKIDLSIPQNISAAGINKKDFYNTLDKMSELAFDDQCTTANPRYPLISELKDIYIKSF

SEQ ID NO: 130 - protein, 858 aa, Artificial Sequence
  Synthetic Construct
MKVTNQKELKQKLNELREAQKKFATYTQEQVDKIFKQCAIAAAKERINLAKLAVEETGIGLVEDKIIKNHFAAEYIYNKYKNEKTCGIIDHDDSLGITKVAEPIGIVAAIVPTTNPTSTAIFKSLISLKTRNAIFFSPHPRAKKSTIAAAKLILDAAVKAGAPKNIIGWIDEPSIELSQDLMSEPDIILATGGPSMVKAAYSSGKPAIGAGAGNTPAIIDESADIDMAVSSIILSKTYDNGVICASEQSILVMNSIYEKVKEEFVKRGSYILNQEEIAKIKETMFKNGAINADIVGKSAYIIAKMAGIEVPQTTKILIGEVQSVEKSELFSHEKLSPVLAMYKVKDFDEALKKAQRLIELGGSGHTSSLYSDSQNNKDKVKEFGLAMKTSRTFINMPSSQGASGDLYNFAIAPSFTLGCGTWGGNSVSQNVEPKHLLNIKSVAERREKRPWFKVPQKIYFKYGCLRFALKELKDMNKKRAFIVTDKDLFKLGYVNKITKVLDEIDIKYSIFTDIKSDPTIDSVKKGAKEMLNFEPDTIISIGGGSPMDAAKVMHLLYEYPEAEIENLAINFMDIRKRICNFPKLGTKAISVAIPTTAGTGSEATPFAVITNDETGMKYPLTSYELTPNMAIIDTELMLNMPRKLTAATGIDALVHAIEAYVSVMATDYTDELALRAIKMIFKYLPRAYKNGTNDIEAREKMAHASNIAGMAFANAFLGVCHSMAHKLGAMHHVPHGIACAVLIEEVIKYNATDCPTKQTAFPQYKSPNAKRKYAEIAEYLNLKGTSDTEKVTALIEAISKLKIDLSIPQNISAAGINKKDFYNTLDKMSELAFDDQCTTANPRYPLISELKDIYIKSF

SEQ ID NO: 131 - protein, 858 aa, Artificial Sequence
  Synthetic Construct
MKVTNQKELKQKLNELREAQKKFACYTQEQVDKIFKQCAIAAAKERINLARLAVEETGIGLVEDKIIKNHFAAEYIYNKYKNGKTCGIIDHDDSLGITKVAEPIGIVAAIVPTTNPTSTAIFKSLISLKTRNAIFFSPHPRAKKSTIAAAKLILDAAVKAGAPKNIIGWIDEPSIELSQDLMSEADIILATGGPSMVKAAYSSGKPAIGVGAGNTPAIIDESADIDMAVSSIILSKTYDNGVICASEQSILVMNSIYEKVKEEFVKRGSYILNQNEIAKIKETMFKNGAINADIVGKSAYIIAKMAGIEVPQTTKILIGEVQSVEKSELFSHEKLSPVLAMYKVKDFDEALKKAQRLIELGGSGHTSSLYIDSQNNKDKVKEFGLAMKTSRTFINMPSSQGASGDLYNFAIAPSFTLGCGTWEGNSVSQNVEPKHLLNIKSVAERREKRPWFKVPQKIYFKYGCLRFALKELKDMNKKRAFIVTDKDLFKLGYVNKITKVLDEIDIKYSIFTDIKSDPTIDSVKKGAKEMLNFEPDTIISIGGGSPMDAAKVMHLLYEYPEAEIENLAINFMDIRKRICNFPKLGTKAISVAIPTTAGTGSEATPFAVITNDETGMKYPLTSYELTPNMAIIDTELMLNMPRKLTAATGIDALVHAIEAYVSVMATDYTDELALRAIKMIFKYLPRAYKNGTNDIEAREKMAHASNIAGMAFANAFLGVCHSMAHKLGAMHHVPHGIACAVLIEEVIKYNATDCPTKQTAFPQYKSPNAKRKYAEIAEYLNLKGTSDTEKVTALIEAISKLKIDLSIPQNISAAGINKKDFYNTLDKMSELAFDDQCTTANPRYPLISELKDIYIKSF

SEQ ID NO: 132 - protein, 858 aa, Artificial Sequence
  Synthetic Construct
MKVTNQKELKQKDNELREAQKKFATYTQEQVDKIFKQCAIAAAKERINLARLAVEETGIGLVEDKIIKNHFAAEYIYNKYKNEKTCGIIDHDDSLGITKVAEPIGIVAAIVPTTNPTSTAIFKSLISLKTRNAIFFSPHPRAKKSTIAAAKLILDAAVKAGAPKNIIGWIDEPSIELSQDLMSEADIILATGGPSMVKAAYSSGKPAIGVGAGNTPAIIDESADIDMAVSSIILSKTYDNGVICASEQSILVMNSIYEKVKAEFVKRGSYILNQNEIAKIKETMFKNGAINADIVGKSAYIIAKMAGIEVPQTTKILIGEVQSVEKSELFSEEKLSPVLAMYKVKDFDEALKKAQRLIHLGGSGHTSSLYIDSQNNKDKVKEFGLAMKTSRTFINMPSSQGASGDLYNFAIAPSFTLGCGTWGGNSVSQNVEPKHLLNIKSVAERREKRPWFKVPQKIYFKYGCLRFALKELKDMNKKRAFIVTDKDLFKLGYVNKITKVLDEIDIKYSIFTDIKSDPTIDSVKKGAKEMLNFEPDTIISIGGGSPMDAAKVMHLLYEYPEAEIENLAINFMDIRKRICNFPKLGTKAISVAIPTTAGTGSEATPFAVITNDETGMKYPLTSYELTPNMAIIDTELMLNMPRKLTAATGIDALVHAIEAYVSVMATDYTDELALRAIKMIFKYLPRAYKNGTNDIEAREKMAHASNIAGMAFANAFLGVCHSMAHKLGAMHHVPHGIACAVLIEEVIKYNATDCPTKQTAFPQYKSPNAKRKYAEIAEYLNLKGTSDTEKVTALIEAISKLKIDLSIPQNISAAGINKKDFYNTLDKMSELAFDDQCTTANPRYPLISELKDIYIKSF

SEQ ID NO: 133 - protein, 858 aa, Artificial Sequence
  Synthetic Construct
MKVTNQKELKQKLNELREAQKKFATYTQEQVDKIFKQCAIAAAKERINLAKLAVEETGIGLVEDKIIKNHFAAEYIYNKYKNEKTCGIIDHDDSLGITKVAEPIGIVAAIVPTTNPTSTAIFKSLISLKTRNAIFFSPHPRAKKSTIAAAKLILDAAVKAGAPKNIIGWIDEPSIELSQDMMSEADIILATGGPSMVKAAYSSGKPAIGVGAGNTPAIIDESADIDMAVSSIILSKTYDNGVICASEQSILVMNSIYEKVKEEFVKRGSYILNQNEIAKIKETMFKNGAINADIVGKSAYIIAKMAGIEVPQTTKILIGEVQSVEKSELFSEEKLSPVLAMYKVKDFDEALDKAQRLINLGGSGHTSSLYIDSQNNKDKVKEFGLAMKTSRTFINMPSSQGASGDLYNFAIAPSFTLACGTWGGNSVSQNVEPKHLLNIKSVAERREKRPWFKVPQKIYFKYGCLRFALKELKDMNKKRAFIVTDKDLFKLGYVNKITKVLDEIDIKYSIFTDIKSDPTIDSVKKGAKEMLNFEPDTIISIGGGSPMDAAKVMHLLYEYPEAEIENLAINFMDIRKRICNFPKLGTKAISVAIPTTAGTGSEATPFAVITNDETGMKYPLTSYELTPNMAIIDTELMLNMPRKLTAATGIDALVHAIEAYVSVMATDYTDELALRAIKMIFKYLPRAYKNGTNDIEAREKMAHASNIAGMAFANAFLGVCHSMAHKLGAMHHVPHGIACAVLIEEVIKYNATDCPTKQTAFPQYKSPNAKRKYAEIAEYLNLKGTSDTEKVTALIEAISKLKIDLSIPQNISAAGINKKDFYNTLDKMSELAFDDQCTTANPRYPLISELKDIYIKSF

SEQ ID NO: 134 - protein, 858 aa, Artificial Sequence
  Synthetic Construct
MKVTNQKELKQKLNELREAQKKFATYTQEQVDKIFKQCAIAAAKERINLAKLAVEETGIGLVEDKIIKNHFAAEYIYNKYKNGKTCGIIDHDDSLGITKVAEPIGIVAAIVPTTNPTSTAIFKSLISLKTRNAIFFSPHPRAKKSTIAAATLILDAAVKAGAPKNIIGWIDEPSIELSQDLMSEADIILATGGPSMVKAAYSSGKPAIGVGAGNTPAIIDESADIDMAVSSIILSKTYDNGVICASEQSILVMNSIYEKVKEEFVKRGSYILNQNAIAKIKETMFKNGAINADIVGKSAYIIAKMAGIEVPQTTKILIGEVQHVEKSELFSHEKLSPVLAMYKVKDFDEALKKAQRLIHLGGSGHTSSLYIDSQNNKDKVKEFGLAMKTSRTFINMPSSQGASGDLYNFAIAPSFTLGCGTWGGNSVSQNVEPKHLLNIKSVAERREKRPWFKVPQKIYFKYGCLRFALKELKDMNKKRAFIVTDKDLFKLGYVNKITKVLDEIDIKYSIFTDIKSDPTIDSVKKGAKEMLNFEPDTIISIGGGSPMDAAKVMHLLYEYPEAEIENLAINFMDIRKRICNFPKLGTKAISVAIPTTAGTGSEATPFAVITNDETGMKYPLTSYELTPNMAIIDTELMLNMPRKLTAATGIDALVHAIEAYVSVMATDYTDELALRAIKMIFKYLPRAYKNGTNDIEAREKMAHASNIAGMAFANAFLGVCHSMAHKLGAMHHVPHGIACAVLIEEVIKYNATDCPTKQTAFPQYKSPNAKRKYAEIAEYLNLKGTSDTEKVTALIEAISKLKIDLSIPQNISAAGINKKDFYNTLDKMSELAFDDQCTTANPRYPLISELKDIYIKSF

SEQ ID NO: 135 - protein, 858 aa, Artificial Sequence
  Synthetic Construct
MKVTNQKELKQKLNELREAQKKFATMTQEQVEKIFKQCAIAAAKLRINLAKLAVEETGIGLVEDKIIKNHFAAEYIYNKYKNEKTCGIIDHDDSLGITKVAEPIGIVAAIVPTTNPTSTAIFKSLISLKTRNAIFFSPHPRAKKSTIAAAKLILDAAVKAGAPKNIIGWIDEPSIELSQDLMSEADIILATGGPSMVKAAYSSGKPAIGVGAGNTPAIIDESADIDMAVSSIILSKTYDNGVICASEQSILVMNSIYEKVKKEFVKRGSYILNQNEIAKIKETMFKNGAINADIVGKSAYIIAKMAGIEVPQYTKILIGEVQSVEKSELFSHEKLSPVLAMYKVKDFDEALKKAQRLIELGGSGHTSSLYIDSQNNKDKVKEFGLAMKTSRTFINMPSSQGASGDLYNFAIAPSFTLGCGTWGGNSVSQNVEPKHLLNIKSVAERREKRPWFKVPQKIYFKYGCLRFALKELKDMNKKRAFIVTDKDLFKLGYVNKITKVLDEIDIKYSIFTDIKSDPTIDSVKKGAKEMLNFEPDTIISIGGGSPMDAAKVMHLLYEYPEAEIENLAINFMDIRKRICNFPKLGTKAISVAIPTTAGTGSEATPFAVITNDETGMKYPLTSYELTPNMAIIDTELMLNMPRKLTAATGIDALVHAIEAYVSVMATDYTDELALRAIKMIFKYLPRAYKNGTNDIEAREKMAHASNIAGMAFANAFLGVCHSMAHKLGAMHHVPHGIACAVLIEEVIKYNATDCPTKQTAFPQYKSPNAKRKYAEIAEYLNLKGTSDTEKVTALIEAISKLKIDLSIPQNISAAGINKKDFYNTLDKMSELAFDDQCTTANPRYPLISELKDIYIKSF

SEQ ID NO: 136 - protein, 858 aa, Artificial Sequence
  Synthetic Construct
MKVTNQKELKQKLNELREAQKKFACMTQEQVDKIFKQCAIAAAKERINLAKLAVEETGIGLVEDKIIKNHFAAEYIYNKYKNEKTCGIIDHDDSLGITKVAEPIGIVAAIVPTTNPTSTAIFKSLISLKTRNAIFFSPHPRAKKSTIAAAKLILDAAVKAGAPKNIIGWIDEPSIELSQDLMSEADIILATGGPSMVKAAYSSGKKAIGVGAGNTPAIIDESADIDMAVSSIILSKTYDNGVICASEQSILVMNSIYEKVKEEFVKRGSYILNQNEIAKIKETMFKNGAINADIVGKSAYIIAKMAGIEVPQTTKILIGEVQSVEKSELFSHEKLSPVLAMYKVKDFDEALKLAQRLIELGGSGHTSSLYIDSQNNKDKVKEFGLAMKTSITFINMPSSQGASGDLYNFAIAPSFTLGCGTWGGNSVSQNVEPKHLLNIKSVAERREKRPWFKVPQKIYFKYGCLRFALKELKDMNKKRAFIVTDKDLFKLGYVNKITKVLDEIDIKYSIFTDIKSDPTIDSVKKGAKEMLNFEPDTIISIGGGSPMDAAKVMHLLYEYPEAEIENLAINFMDIRKRICNFPKLGTKAISVAIPTTAGTGSEATPFAVITNDETGMKYPLTSYELTPNMAIIDTELMLNMPRKLTAATGIDALVHAIEAYVSVMATDYTDELALRAIKMIFKYLPRAYKNGTNDIEAREKMAHASNIAGMAFANAFLGVCHSMAHKLGAMHHVPHGIACAVLIEEVIKYNATDCPTKQTAFPQYKSPNAKRKYAEIAEYLNLKGTSDTEKVTALIEAISKLKIDLSIPQNISAAGINKKDFYNTLDKMSELAFDDQCTTANPRYPLISELKDIYIKSF

SEQ ID NO: 137 - protein, 858 aa, Artificial Sequence
  Synthetic Construct
MKVTNQKELKQKLNELREAQKKFATYTQEQVDKIFKQCAIAAAKERINLAKLAVEETGIGLVEDKIIKNHFAAEYIYNKYKNEKTCGIIDHDDSLGITKVAEPIGIVAAIVPTTNPTSTAIFKSLISLKTRNAIFFSPHPRAKKSTIAAAKLILDAAVKAGAPKNIIGWIDEPSIELSQDLMSEADIILATGGPSMVKAAYSSGKPAIGVGAGNTPAIIDESADIDMAVSSIILSKTYDNGVICASEQSILVMNSIYEKVKEEFVKRGSYILNQQAIAKIKETMFKNGAINADIVGKSAYIIAKMAGIEVPQYTKILIGEVQSVEKSELFSHEKLSPVLAMYKVKDFDEALKKAERLIELGGSGHTSSLYSDSQNNKDKVKEFGLAMKTSRTFINMPSSQGASGDLYNFAIAPSFTLGCGTWGGNSVSQNVEPKHLLNIKSVAERREKRPWFKVPQKIYFKYGCLRFALKELKDMNKKRAFIVTDKDLFKLGYVNKITKVLDEIDIKYSIFTDIKSDPTIDSVKKGAKEMLNFEPDTIISIGGGSPMDAAKVMHLLYEYPEAEIENLAINFMDIRKRICNFPKLGTKAISVAIPTTAGTGSEATPFAVITNDETGMKYPLTSYELTPNMAIIDTELMLNMPRKLTAATGIDALVHAIEAYVSVMATDYTDELALRAIKMIFKYLPRAYKNGTNDIEAREKMAHASNIAGMAFANAFLGVCHSMAHKLGAMHHVPHGIACAVLIEEVIKYNATDCPTKQTAFPQYKSPNAKRKYAEIAEYLNLKGTSDTEKVTALIEAISKLKIDLSIPQNISAAGINKKDFYNTLDKMSELAFDDQCTTANPRYPLISELKDIYIKSF

SEQ ID NO: 138 - protein, 858 aa, Artificial Sequence
  Synthetic Construct
MKVTNQKELKQKLNELREAQKKFATYTQAQVDKIFKQCAIAAAKERINLAKLAVEETGIGLVEDKIIKNHFAAEYIYNKYKNEKTCGIIDHDDSLGITKVAEPIGIVAAIVPTTNPTSTAIFKSLISLKTRNAIFFSPHPRAKKSTIAAAKLILDAAVKAGAPKNIIGWIDEPSIELSQDLMSEADIILATGGPSMVKAAYSSGKPAIGAGAGNTPAIIDESADIDMAVSSIILSKTYDNNVICASEQSILVMNSIYEKVKKEFVKRGSYILNQNEIAKIKETMFKNGAINADIVGKSAYIIAKMAGIEVPQTTKILIGEVQHVEKSELFSHEKLSPVLAMYKVKDFDEALKKAQRLIELGGSGHTSSLYIDSQNNKDKVKEFGLAMKTSRTFINMPSSQGASGDLYNFAIAPSFTLGCGTWGGNSVSQNVEPKHLLNIKSVAERREKRPWFKVPQKIYFKYGCLRFALKELKDMNKKRAFIVTDKDLFKLGYVNKITKVLDEIDIKYSIFTDIKSDPTIDSVKKGAKEMLNFEPDTIISIGGGSPMDAAKVMHLLYEYPEAEIENLAINFMDIRKRICNFPKLGTKAISVAIPTTAGTGSEATPFAVITNDETGMKYPLTSYELTPNMAIIDTELMLNMPRKLTAATGIDALVHAIEAYVSVMATDYTDELALRAIKMIFKYLPRAYKNGTNDIEAREKMAHASNIAGMAFANAFLGVCHSMAHKLGAMHHVPHGIACAVLIEEVIKYNATDCPTKQTAFPQYKSPNAKRKYAEIAEYLNLKGTSDTEKVTALIEAISKLKIDLSIPQNISAAGINKKDFYNTLDKMSELAFDDQCTTANPRYPLISELKDIYIKSF

SEQ ID NO: 139 - protein, 858 aa, Artificial Sequence
  Synthetic Construct
MKVTNQKELKQKLNELREAQKKFASYTQAQVDKIFKQCAIAAAKERINLAKLAVEETGIGLVEDKIIKNHFAAEYIYNKYKNHKTCGIIDHDDSLGITKVAEPIGIVAAIVPTTNPTSTAIFKSLISLKTRNAIFFSPHPRAKKSTIAAAKLILDAAVKAGAPKNIIGWIDEPSIELSQDLMSEADIILATGGPSMVKAAYSSGKPAIGVGAGNTPAIIDESADIDMAVSSIILSKTYDNGVICASEQSILVMNSIYEKVKEEFVKRGSYILNQNEIAKIKETMFKNGAINADIVGKSAYIIAKMAGIEVPQTTKILIGEVQSVEKSELFSVEKLSPVLAMYKVKDFDEALKKAQRLIELGGSGHTSSLYIDSQNNKDKVKEFGLRMKTSRTFINMPSSQGASGDLYNFAIAPSFTLGCGTWGGNSVSQNVEPKHLLNIKSVAERREKRPWFKVPQKIYFKYGCLRFALKELKDMNKKRAFIVTDKDLFKLGYVNKITKVLDEIDIKYSIFTDIKSDPTIDSVKKGAKEMLNFEPDTIISIGGGSPMDAAKVMHLLYEYPEAEIENLAINFMDIRKRICNFPKLGTKAISVAIPTTAGTGSEATPFAVITNDETGMKYPLTSYELTPNMAIIDTELMLNMPRKLTAATGIDALVHAIEAYVSVMATDYTDELALRAIKMIFKYLPRAYKNGTNDIEAREKMAHASNIAGMAFANAFLGVCHSMAHKLGAMHHVPHGIACAVLIEEVIKYNATDCPTKQTAFPQYKSPNAKRKYAEIAEYLNLKGTSDTEKVTALIEAISKLKIDLSIPQNISAAGINKKDFYNTLDKMSELAFDDQCTTANPRYPLISELKDIYIKSF

SEQ ID NO: 140 - protein, 858 aa, Artificial Sequence
  Synthetic Construct
MKVTNQKELKQKLNELREAQKKFATYTQDQVDKIFKQCAIAAAKERINLAKLAVEETGIGLVEDKIIKNHFAAEYIYNKYKNEKTCGIIDHDDSLGITKVAEPIGIVAAIVPTTNPTSTAIFKSLISLKTRNAIFFSPHPRAKKSTIAAAKLILDAAVKAGAPKNIIGWIDEPSIELSQDLMSEADIILATGGPSMVKAAYSSGKPAIGVGAGNTPAIIDESADIDMAVSSIILSKTYDNNVICASEQSILVMNSIYEKVKEEFVKRGSYILNQNEIAKIKETMFKNGAINADIVGKSAYIIAKMAGIEVPQTTKILIGEVQSVEASELFSHEKLSPVLAMYKVKDFDEALKKAQRLIELGGSGHTSSLYIDSQNNKDKVKEFGLAMKTSITFINMPSSQGASGDLYNFAIAPSFTLGCGTWEGNSVSQNVEPKHLLNIKSVAERREKRPWFKVPQKIYFKYGCLRFALKELKDMNKKRAFIVTDKDLFKLGYVNKITKVLDEIDIKYSIFTDIKSDPTIDSVKKGAKEMLNFEPDTIISIGGGSPMDAAKVMHLLYEYPEAEIENLAINFMDIRKRICNFPKLGTKAISVAIPTTAGTGSEATPFAVITNDETGMKYPLTSYELTPNMAIIDTELMLNMPRKLTAATGIDALVHAIEAYVSVMATDYTDELALRAIKMIFKYLPRAYKNGTNDIEAREKMAHASNIAGMAFANAFLGVCHSMAHKLGAMHHVPHGIACAVLIEEVIKYNATDCPTKQTAFPQYKSPNAKRKYAEIAEYLNLKGTSDTEKVTALIEAISKLKIDLSIPQNISAAGINKKDFYNTLDKMSELAFDDQCTTANPRYPLISELKDIYIKSF

SEQ ID NO: 141 - protein, 858 aa, Artificial Sequence
  Synthetic Construct
MKVTNQKELKQKLNELREAQKKFATYTQEQVDKIFKQCAIAAAKERINLAKLAVEETGIGLVEDKIIKNHFAAEYIYNKYKNEKTCGIIDHDDSLGITKVAEPIGIVAAIVPTTNPTSTAIFKSLISLKTRNAIFFSPHPRAKKSTIAAATLILDAAVKAGAPKNIIGWIDEPSIELSQDLMSEADIILATGGPSMVKAAYSSGKPAIGVGAGNTPAIIDESADIDMAVSSIILGKTYDNGVICASEQSILVMNSIYEKVKEEFVKRGSYILNQNEIAKIKETMFKNGAINADIVGKSAYIIAKMAGIEVPQTTKILIGEVQSVEKSELFSHELLSPVLAMYKVKDFDEALKKAQRLIELGGSHHTSSLYIDSQNNKDKVKEFGLEMKTSRTFINMPSSQGASGDLYNFAIAPSFTLGCGTWGGNSVSQNVEPKHLLNIKSVAERREKRPWFKVPQKIYFKYGCLRFALKELKDMNKKRAFIVTDKDLFKLGYVNKITKVLDEIDIKYSIFTDIKSDPTIDSVKKGAKEMLNFEPDTIISIGGGSPMDAAKVMHLLYEYPEAEIENLAINFMDIRKRICNFPKLGTKAISVAIPTTAGTGSEATPFAVITNDETGMKYPLTSYELTPNMAIIDTELMLNMPRKLTAATGIDALVHAIEAYVSVMATDYTDELALRAIKMIFKYLPRAYKNGTNDIEAREKMAHASNIAGMAFANAFLGVCHSMAHKLGAMHHVPHGIACAVLIEEVIKYNATDCPTKQTAFPQYKSPNAKRKYAEIAEYLNLKGTSDTEKVTALIEAISKLKIDLSIPQNISAAGINKKDFYNTLDKMSELAFDDQCTTANPRYPLISELKDIYIKSF

SEQ ID NO: 142 - protein, 858 aa, Artificial Sequence
  Synthetic Construct
MKVTNQKELKQKLNELREAQKKFATYTQEQVEKFFKQCAIAAAKERINLAKLAVEETGIGLVEDKIIKNHFAAEYIYNKYKNEKTCGIIDHDDSLGITKVAEPIGIVASIVPTTNPTSTAIFKSLISLKTRNAIFFSPHPRAKKSTIAAAKLILDAAVKAGAPKNIIGWIDEPSIELSQDLMSEADIILATGGPSMVKAAYSSGKPAIGVGAGNTPAIIDESADIDMAVSSIILSKTYDNGVICASEQSILVMNSIYEKVKEEFVKRGSYILNQNEIAKIKETMFKNGAINADIVGKSAYIIAKMAGIEVPQTTKILIGEVQSVEKSELFSHEKLSPVLAMYKVKDFDEALKKAQRLIELGGSGHTSSLYIDSQNNKDKVKEFGLAMKTSRTFINMPSSQGASGDLYNFAIAPSFTLGCPTWGGNSVSQNVEPKHLLNIKSVARRREKRPWFKVPQKIYFKYGCLRFALKELKDMNKKRAFIVTDKDLFKLGYVNKITKVLDEIDIKYSIFTDIKSDPTIDSVKKGAKEMLNFEPDTIISIGGGSPMDAAKVMHLLYEYPEAEIENLAINFMDIRKRICNFPKLGTKAISVAIPTTAGTGSEATPFAVITNDETGMKYPLTSYELTPNMAIIDTELMLNMPRKLTAATGIDALVHAIEAYVSVMATDYTDELALRAIKMIFKYLPRAYKNGTNDIEAREKMAHASNIAGMAFANAFLGVCHSMAHKLGAMHHVPHGIACAVLIEEVIKYNATDCPTKQTAFPQYKSPNAKRKYAEIAEYLNLKGTSDTEKVTALIEAISKLKIDLSIPQNISAAGINKKDFYNTLDKMSELAFDDQCTTANPRYPLISELKDIYIKSF

SEQ ID NO: 143 - protein, 858 aa, Artificial Sequence
  Synthetic Construct
MKVTNQKELKQKLNELREAQKKFATYTQEQVDKIFKQCAIAAAKERINLAKLAVEETGIGLVEDKIIKNHFAAEYIYNKYKNEKTCGIIDHDDSLGITKVAEPIGIVAAIVPTTNPTSTAIFKSLISLKTRNAIFFSPHPRAKKSTIAAAKLILDAAVKAGAPKNIIGWIDEPSIELSQDLMSEADIILATGGPSMVKAAYSSGKPAIGVGAGNTPAIIDESADIDMAVSSIILSKTYDNGVICASEQSILVMNSIYEKVKEEFVKRGSYILNQQEIAKIKETMFKNGAINADIVGKSAYIIAKMAGIEVPQTTKILIGEVQSVEKSELFSKEKLSPVLAMYKVKDFDEALKKAQRLIELGGSHHTSSLYIDSQNNKDKVKEFGLRMKTSRFFINMPSSQGASGDLYNFAIAPSFTLGCGTWGGNSVSQNVEPKHLLNIKSVAERREKRPWFKVPQKIYFKYGCLRFALKELKDMNKKRAFIVTDKDLFKLGYVNKITKVLDEIDIKYSIFTDIKSDPTIDSVKKGAKEMLNFEPDTIISIGGGSPMDAAKVMHLLYEYPEAEIENLAINFMDIRKRICNFPKLGTKAISVAIPTTAGTGSEATPFAVITNDETGMKYPLTSYELTPNMAIIDTELMLNMPRKLTAATGIDALVHAIEAYVSVMATDYTDELALRAIKMIFKYLPRAYKNGTNDIEAREKMAHASNIAGMAFANAFLGVCHSMAHKLGAMHHVPHGIACAVLIEEVIKYNATDCPTKQTAFPQYKSPNAKRKYAEIAEYLNLKGTSDTEKVTALIEAISKLKIDLSIPQNISAAGINKKDFYNTLDKMSELAFDDQCTTANPRYPLISELKDIYIKSF

SEQ ID NO: 144 - protein, 858 aa, Artificial Sequence
  Synthetic Construct
MKVTNQKELKQKLNELREAQKKFNTYTQEQVDKIFKQCAIAAAKERINLAKLAVEETGIGLVEDKIIKNHFAAEYIYNKYKNEKTCGIIDHDDSLGITKVAEPIGIVAAIVPTTNPTSTAIFKSLISLKTRNAIFFSPHPRAKKSTIAAAKLILDAAVKAGAPKNIIGWIDEPSIELSQDLMKEADIILATGGPSMVKAAYSSGKPAIGVGAGNTPAIIDESADIDMAVSSIILSKTYDNGVICASEQSILVMNSIYEKVKEEFVKRGSYILNQNEIAKIKETMFKNGAINADIVGKSAYIIAKMAGIEVPQFTKILIGEVQSVEKSELFSHEKLSPVLAMYKVKDFDEALKKAQRLINLGGSGHTSSLYSDSQNNKDKVKEFGLAMKTSRTFINMPSSQGASGDLYNFAIAPSFTLGCGTWGGNSVSQNVEPKHLLNIKSVAERREKRPWFKVPQKIYFKYGCLRFALKELKDMNKKRAFIVTDKDLFKLGYVNKITKVLDEIDIKYSIFTDIKSDPTIDSVKKGAKEMLNFEPDTIISIGGGSPMDAAKVMHLLYEYPEAEIENLAINFMDIRKRICNFPKLGTKAISVAIPTTAGTGSEATPFAVITNDETGMKYPLTSYELTPNMAIIDTELMLNMPRKLTAATGIDALVHAIEAYVSVMATDYTDELALRAIKMIFKYLPRAYKNGTNDIEAREKMAHASNIAGMAFANAFLGVCHSMAHKLGAMHHVPHGIACAVLIEEVIKYNATDCPTKQTAFPQYKSPNAKRKYAEIAEYLNLKGTSDTEKVTALIEAISKLKIDLSIPQNISAAGINKKDFYNTLDKMSELAFDDQCTTANPRYPLISELKDIYIKSF

SEQ ID NO: 145 - protein, 858 aa, Artificial Sequence
  Synthetic Construct
MKVTNQKELKQKDNELREAQKKFATCTQDQVDKIFKQCAIAAAKERINLAKLAVEETGIGLVEDKIIKNHFAAEYIYNKYKNEKTCGIIDHDDSLGITKVAEPIGIVAAIVPTTNPTSTAIFKSLISLKTRNAIFFSPHPRAKKSTIAAAKLILDAAVKAGAPKNIIGWIDEPSIELSQDLMSEADIILATGGPSMVKAAYSSGKPAIGVGAGNTPAIIDESADIDMAVSSIILGKTYDNGVICASEQSILVMNSIYEKVKEEFVKRGSYILNQNEIAKIKETMFKNGAINADIVGKSAYIIAKMAGIEVPQTTKILIGEVQSVEKSELFSKEKLSPVLAMYKVKDFDEALKKAQRLIELGGSGHTSSLYIDSQNNKDKVKEFGLAMKTSRTFINMPSSQGASGDLYNFAIAPSFTLGCGTWGGNSVSQNVEPKHLLNIKSVAERREKRPWFKVPQKIYFKYGCLRFALKELKDMNKKRAFIVTDKDLFKLGYVNKITKVLDEIDIKYSIFTDIKSDPTIDSVKKGAKEMLNFEPDTIISIGGGSPMDAAKVMHLLYEYPEAEIENLAINFMDIRKRICNFPKLGTKAISVAIPTTAGTGSEATPFAVITNDETGMKYPLTSYELTPNMAIIDTELMLNMPRKLTAATGIDALVHAIEAYVSVMATDYTDELALRAIKMIFKYLPRAYKNGTNDIEAREKMAHASNIAGMAFANAFLGVCHSMAHKLGAMHHVPHGIACAVLIEEVIKYNATDCPTKQTAFPQYKSPNAKRKYAEIAEYLNLKGTSDTEKVTALIEAISKLKIDLSIPQNISAAGINKKDFYNTLDKMSELAFDDQCTTANPRYPLISELKDIYIKSF

SEQ ID NO: 146 - protein, 858 aa, Artificial Sequence
  Synthetic Construct
MKVTNQKELKQKLNELREAQKKFNTYTQEQVDKIFKQCAIAAAKERINLAKLAVEETGIGLVEDKIIKNHFAAEYIYNKEKNEKTCGIIDHDDSLGITKVAEPIGIVASIVPTTNPTSTAIFKSLISLATRNAIFFSPHPRAKKSTIAAAKLILDAAVKAGAPKNIIGWIDEPSIELSQDLMSEADIILATGGPSMVKAAYSSGKPAIGVGAGNTPAIIDESADIDMAVSSIILSKTYDNGVICASEQSILVMNSIYEKVKEEFVKRGSYILNQEEIAKIKETMFKNGAINADIVGKSAYIIAKMAGIEVPQTTKILIGEVQSVEKSELFSHEKLSPVLAMYKVKDFDEALKKAQRLIELGGSGHTSSLYIDSQNNKDKVKEFGLAMKTSRTFINMPSSQGASGDLYNFAIAPSFTLGCGTWGGNSVSQNVEPKHLLNIKSVAERREKRPWFKVPQKIYFKYGCLRFALKELKDMNKKRAFIVTDKDLFKLGYVNKITKVLDEIDIKYSIFTDIKSDPTIDSVKKGAKEMLNFEPDTIISIGGGSPMDAAKVMHLLYEYPEAEIENLAINFMDIRKRICNFPKLGTKAISVAIPTTAGTGSEATPFAVITNDETGMKYPLTSYELTPNMAIIDTELMLNMPRKLTAATGIDALVHAIEAYVSVMATDYTDELALRAIKMIFKYLPRAYKNGTNDIEAREKMAHASNIAGMAFANAFLGVCHSMAHKLGAMHHVPHGIACAVLIEEVIKYNATDCPTKQTAFPQYKSPNAKRKYAEIAEYLNLKGTSDTEKVTALIEAISKLKIDLSIPQNISAAGINKKDFYNTLDKMSELAFDDQCTTANPRYPLISELKDIYIKSF

SEQ ID NO: 147 - protein, 858 aa, Artificial Sequence
  Synthetic Construct
MKVTNQKELKQKLNELREAQKKFASYTQEQVDKIFKQCAIAAAKERINLAELAVEETGIGLVEDKIIKNHFAAEYIYNKEKNEKTCGIIDHDDSLGITKVAEPIGIVAAIVPTTNPTSTAIFKSLISLKTRNAIFFSPHPRAKKSTIAAAKLILDAAVKAGAPKNIIGWIDEPSIELSQDLMSEADIILATGGPSMVKAAYSSGKPAIGVGAGNTPAIIDESADIDMAVSSIILSKTYDNGVICASEQSILVMNSIYEKVKEEFVKRGSYILNQNEIAKIKETMFKNGAINADIVGKSAYIIAKMAGIEVPQFTKILIGEVQSVEKSELFSHEKLSPVLAMYKVKDFDEALKKAQRLIELGGSGHTSSLYIDSQNNKDKVKEFGLEMKTSRTFINMPSSQGASGDLYNFAIAPSFTLGCGTWGGNSVSQNVEPKHLLNIKSVAERREKRPWFKVPQKIYFKYGCLRFALKELKDMNKKRAFIVTDKDLFKLGYVNKITKVLDEIDIKYSIFTDIKSDPTIDSVKKGAKEMLNFEPDTIISIGGGSPMDAAKVMHLLYEYPEAEIENLAINFMDIRKRICNFPKLGTKAISVAIPTTAGTGSEATPFAVITNDETGMKYPLTSYELTPNMAIIDTELMLNMPRKLTAATGIDALVHAIEAYVSVMATDYTDELALRAIKMIFKYLPRAYKNGTNDIEAREKMAHASNIAGMAFANAFLGVCHSMAHKLGAMHHVPHGIACAVLIEEVIKYNATDCPTKQTAFPQYKSPNAKRKYAEIAEYLNLKGTSDTEKVTALIEAISKLKIDLSIPQNISAAGINKKDFYNTLDKMSELAFDDQCTTANPRYPLISELKDIYIKSF

SEQ ID NO: 148 - protein, 858 aa, Artificial Sequence
  Synthetic Construct
MKVTNQKELKQKLNELREAQKKFATYTQEQVDKIFKQCAIAAAKLRINLARLAVEETGIGLVEDKIIKNHFAAEYIYNKYKNEKTCGIIDHDDSLGITKVAEPIGIVAAIVPTTNPTSTAIFKSLISLKTRNAIFFSPHPRAKKSTIAAAKLILDAAVKAGAPKNIIGWIDEPSIELSQDMMSEADIILATGGPSMVKAAYSSGKPAIGVGAGNTPAIIDESADIDMAVSSIILSATYDNGVICASEQSILVMNSIYEKVKEEFVKRGSYILNQNEIAKIKETMFKNGAINADIVGKSAYIIAKMAGIEVPQTTKILIGEVQSVEKSELFSHEKLSPVLAMYKVKDFDEALKKAQRLIELGGSGHTSSLYIDSQNNKDKVKEFGLAMKTSRTFINMPSSQGASGDLYNFAIAPSFTLGCGTWGGNSVSQNVEPKHLLNIVSVAERREKRPWFKVPQKIYFKYGCLRFALKELKDMNKKRAFIVTDKDLFKLGYVNKITKVLDEIDIKYSIFTDIKSDPTIDSVKKGAKEMLNFEPDTIISIGGGSPMDAAKVMHLLYEYPEAEIENLAINFMDIRKRICNFPKLGTKAISVAIPTTAGTGSEATPFAVITNDETGMKYPLTSYELTPNMAIIDTELMLNMPRKLTAATGIDALVHAIEAYVSVMATDYTDELALRAIKMIFKYLPRAYKNGTNDIEAREKMAHASNIAGMAFANAFLGVCHSMAHKLGAMHHVPHGIACAVLIEEVIKYNATDCPTKQTAFPQYKSPNAKRKYAEIAEYLNLKGTSDTEKVTALIEAISKLKIDLSIPQNISAAGINKKDFYNTLDKMSELAFDDQCTTANPRYPLISELKDIYIKSF

SEQ ID NO: 149 - protein, 858 aa, Artificial Sequence
  Synthetic Construct
MKVTNQKELKQKLNELREAQKKFATCTQEQVDKFFKQCAIAAAKERINLAKLAVEETGIGLVEDKIIKNHFAAEYIYNKYKNEKTCGIIDHDDSLGITKVAEPIGIVAAIVPTTNPTSTAIFKSLISLATRNAIFFSPHPRAKKSTIAAAKLILDAAVKAGAPKNIIGWIDEPSIELSQDLMSEADIILATGGPSMVKAAYSSGKPAIGVGAGNTPAIIDESADIDMAVSSIILSKTYDNGVICASEQSILVMNSIYEKVKEEFVKRGSYILNQNEIAKIKETMFKNGAINADIVGKSAYIIAKMAGIEVPQTTKILIGEVQDVEKSELFSHEKLSPVLAMYKVKDFDEALKLAQRLIELGGSGHTSSLYIDSQNNKDKVKEFGLAMKTSRTFINMPSSQGASGDLYNFAIAPSFTLGCGTWGGNSVSQNVEPKHLLNIKSVAERREKRPWFKVPQKIYFKYGCLRFALKELKDMNKKRAFIVTDKDLFKLGYVNKITKVLDEIDIKYSIFTDIKSDPTIDSVKKGAKEMLNFEPDTIISIGGGSPMDAAKVMHLLYEYPEAEIENLAINFMDIRKRICNFPKLGTKAISVAIPTTAGTGSEATPFAVITNDETGMKYPLTSYELTPNMAIIDTELMLNMPRKLTAATGIDALVHAIEAYVSVMATDYTDELALRAIKMIFKYLPRAYKNGTNDIEAREKMAHASNIAGMAFANAFLGVCHSMAHKLGAMHHVPHGIACAVLIEEVIKYNATDCPTKQTAFPQYKSPNAKRKYAEIAEYLNLKGTSDTEKVTALIEAISKLKIDLSIPQNISAAGINKKDFYNTLDKMSELAFDDQCTTANPRYPLISELKDIYIKSF

SEQ ID NO: 150 - protein, 858 aa, Artificial Sequence
  Synthetic Construct
MKVTNQKELKQKLNELREAQKKFLTYTQEQVDKIFKQCAIAAAKERINLAKLAVEETGIGLVEDKIIKNHFAAEYIYNKYKNEKTCGIIDHDDSLGITKVAEPIGIVAAIVPTTNPTSTAIFKSLISLKTRNAIFFSPHPRAKKSTIAAAKLILDAAVKAGAPKNIIGWIDEPSIELSQDLMKEPDIILATGGPSMVKAAYSSGKPAIGVGAGNTPAIIDESADIDMAVSSIILSKTYDNGVICASEQSILVMNSIYEKVKEEFVKRGSYILNQNEIAKIKETMFKNGAINADIVGKSAYIIAKMAGIEVPQTTKILIGEVQDVEASELFSHEKLSPVLAMYKVKDFDEALKKAQRLIELGGSGHTSSLYIDSQNNKDKVKEFGLAMKTSRTFINMPSSQGASGDLYNFAIAPSFTLGCGTWGGNSVSQNVEPKHLLNIKSVAERREKRPWFKVPQKIYFKYGCLRFALKELKDMNKKRAFIVTDKDLFKLGYVNKITKVLDEIDIKYSIFTDIKSDPTIDSVKKGAKEMLNFEPDTIISIGGGSPMDAAKVMHLLYEYPEAEIENLAINFMDIRKRICNFPKLGTKAISVAIPTTAGTGSEATPFAVITNDETGMKYPLTSYELTPNMAIIDTELMLNMPRKLTAATGIDALVHAIEAYVSVMATDYTDELALRAIKMIFKYLPRAYKNGTNDIEAREKMAHASNIAGMAFANAFLGVCHSMAHKLGAMHHVPHGIACAVLIEEVIKYNATDCPTKQTAFPQYKSPNAKRKYAEIAEYLNLKGTSDTEKVTALIEAISKLKIDLSIPQNISAAGINKKDFYNTLDKMSELAFDDQCTTANPRYPLISELKDIYIKSF

SEQ ID NO: 151 - protein, 858 aa, Artificial Sequence
  Synthetic Construct
MKVTNQKELKQKLNELREAQKKFLCYTQEQVDKIFKQCAIAAAKERINLAKLAVEETGIGLVEDKIIKNHFAAEYIYNKYKNHKTCGIIDHDDSLGITKVAEPIGIVAAIVPTTNPTSTAIFKSLISLKTRNAIFFSPHPRAKKSTIAAAKLILDAAVKAGAPKNIIGWIDEPSIELSQDLMSEADIILATGGPSMVKAAYSSGKPAIGVGAGNTPAIIDESADIDMAVSSIILSKTYDNGVICASEQSILVMNSIYEKVKAEFVKRGSYILNQNEIAKIKETMFKNGAINRDIVGKSAYIIAKMAGIEVPQTTKILIGEVQSVEKSELFSHEKLSPVLAMYKVKDFDEALKKAQRLIELGGSGHTSSLYIDSQNNKDKVKEFGLAMKTSRTFINMPSSQGASGDLYNFAIAPSFTLGCGTWGGNSVSQNVEPKHLLNIKSVAERREKRPWFKVPQKIYFKYGCLRFALKELKDMNKKRAFIVTDKDLFKLGYVNKITKVLDEIDIKYSIFTDIKSDPTIDSVKKGAKEMLNFEPDTIISIGGGSPMDAAKVMHLLYEYPEAEIENLAINFMDIRKRICNFPKLGTKAISVAIPTTAGTGSEATPFAVITNDETGMKYPLTSYELTPNMAIIDTELMLNMPRKLTAATGIDALVHAIEAYVSVMATDYTDELALRAIKMIFKYLPRAYKNGTNDIEAREKMAHASNIAGMAFANAFLGVCHSMAHKLGAMHHVPHGIACAVLIEEVIKYNATDCPTKQTAFPQYKSPNAKRKYAEIAEYLNLKGTSDTEKVTALIEAISKLKIDLSIPQNISAAGINKKDFYNTLDKMSELAFDDQCTTANPRYPLISELKDIYIKSF

SEQ ID NO: 152 - protein, 858 aa, Artificial Sequence
  Synthetic Construct
MKVTNQKELKQKLNELREAQKKFATYTQEQVDKIFKQCAIAAAKYRINLAKLAVEETGIGLVEDKIIKNHFAAEYIYNKYKNEKTCGIIDHDDSLGITKVAEPIGIVAAIVPTTNPTSTAIFKSLISLKTRNAIFFSPHPRAKKSTIAAAKLILDAAVKAGAPKNIIGWIDEPSIELSQDLMSEPDIILATGGPSMVKAAYSSGKPAIGVGAGNTPAIIDESADIDMAVSSIILSKTYDNGVICASEQSILVMNSIYEKVKEEFVKRGSYILNQNEIAKIKETMFKNGAINADIVGKSAYIIAKMAGIEVPQTTKILIGEVQSVEKSELFSVELLSPVLAMYKVKDFDEALKKAERLIELGGSGHTSSLYIDSQNNKDKVKEFGLAMKTSRTFINMPSSQGASGDLYNFAIAPSFTLGCGTWGGNSVSQNVEPKHLLNIKSVAERREKRPWFKVPQKIYFKYGCLRFALKELKDMNKKRAFIVTDKDLFKLGYVNKITKVLDEIDIKYSIFTDIKSDPTIDSVKKGAKEMLNFEPDTIISIGGGSPMDAAKVMHLLYEYPEAEIENLAINFMDIRKRICNFPKLGTKAISVAIPTTAGTGSEATPFAVITNDETGMKYPLTSYELTPNMAIIDTELMLNMPRKLTAATGIDALVHAIEAYVSVMATDYTDELALRAIKMIFKYLPRAYKNGTNDIEAREKMAHASNIAGMAFANAFLGVCHSMAHKLGAMHHVPHGIACAVLIEEVIKYNATDCPTKQTAFPQYKSPNAKRKYAEIAEYLNLKGTSDTEKVTALIEAISKLKIDLSIPQNISAAGINKKDFYNTLDKMSELAFDDQCTTANPRYPLISELKDIYIKSF

SEQ ID NO: 153 - protein, 858 aa, Artificial Sequence
  Synthetic Construct
MKVTNQKELKQKLNELREAQKKFATYTQEQVDKIFKQCAIAAAKYRINLAKLAVEETGIGLVEDKIIKNHFAAEYIYNKYKNEKTCGIIDHDDSLGITKVAEPIGIVAAIVPTTNPTSTAIFKSLISLKTRNAIFFSPHPRAKKSTIAAAKLILDAAVKAGAPKNIIGWIDEPSIELSQDLMSEADIILATGGPSMVKAAYSSGKPAIGVGAGNTPAIIDESADIDMAVSSIILSKTYDNGVICASEQSILVMNSIYEKVKEEFVKRGSYILNQEEIAKIKETMFKNGAINRDIVGKSAYIIAKMAGIEVPQTTKILIGEVQSVEKSELFSHEKLSPVLAMYKVKDFDEALDKAQRLIELGGSGHTSSLYIDSQNNKDKVKEFGLAMKTSRFFINMPSSQGASGDLYNFAIAPSFTLGCGTWGGNSVSQNVEPKHLLNIKSVAERREKRPWFKVPQKIYFKYGCLRFALKELKDMNKKRAFIVTDKDLFKLGYVNKITKVLDEIDIKYSIFTDIKSDPTIDSVKKGAKEMLNFEPDTIISIGGGSPMDAAKVMHLLYEYPEAEIENLAINFMDIRKRICNFPKLGTKAISVAIPTTAGTGSEATPFAVITNDETGMKYPLTSYELTPNMAIIDTELMLNMPRKLTAATGIDALVHAIEAYVSVMATDYTDELALRAIKMIFKYLPRAYKNGTNDIEAREKMAHASNIAGMAFANAFLGVCHSMAHKLGAMHHVPHGIACAVLIEEVIKYNATDCPTKQTAFPQYKSPNAKRKYAEIAEYLNLKGTSDTEKVTALIEAISKLKIDLSIPQNISAAGINKKDFYNTLDKMSELAFDDQCTTANPRYPLISELKDIYIKSF

SEQ ID NO: 154 - protein, 858 aa, Artificial Sequence
  Synthetic Construct
MKVTNQKELKQKLNELREAQKKFATYTQEQVDKIFKQCAIAAAKERINLAELAVEETGIGLVEDKIIKNHFAAEYIYNKYKNGKTCGIIDHDDSLGITKVAEPIGIVAAIVPTTNPTSTAIFKSLISLKTRNAIFFSPHPRAKKSTIAAAKLILDAAVKAGAPKNIIGWIDEPSIELSQDLMSEADIILATGGPSMVKAAYSSGKKAIGAGAGNTPAIIDESADIDMAVSSIILSATYDNGVICASEQSILVMNSIYEKVKEEFVKRGSYILNQNEIAKIKETMFKNGAINADIVGKSAYIIAKMAGIEVPQTTKILIGEVQSVEKSELFSHEKLSPVLAMYKVKDFDEALKKAQRLIELGGSGHTSSLYIDSQNNKDKVKEFGLAMKTSRTFINMPSSQGASGDLYNFAIAPSFTLGCGTWGGNSVSQNVEPKHLLNIKSVAERREKRPWFKVPQKIYFKYGCLRFALKELKDMNKKRAFIVTDKDLFKLGYVNKITKVLDEIDIKYSIFTDIKSDPTIDSVKKGAKEMLNFEPDTIISIGGGSPMDAAKVMHLLYEYPEAEIENLAINFMDIRKRICNFPKLGTKAISVAIPTTAGTGSEATPFAVITNDETGMKYPLTSYELTPNMAIIDTELMLNMPRKLTAATGIDALVHAIEAYVSVMATDYTDELALRAIKMIFKYLPRAYKNGTNDIEAREKMAHASNIAGMAFANAFLGVCHSMAHKLGAMHHVPHGIACAVLIEEVIKYNATDCPTKQTAFPQYKSPNAKRKYAEIAEYLNLKGTSDTEKVTALIEAISKLKIDLSIPQNISAAGINKKDFYNTLDKMSELAFDDQCTTANPRYPLISELKDIYIKSF

SEQ ID NO: 155 - DNA, 2573 bp, Artificial Sequence
  Synthetic Construct
atgaaagtgacgaaccaaaaagaactgaaacaaaaactgaatgaactgcgtgaggcccagaaaaagttcgctacgtatacccaggagcaagttgacaagatcttcaaacagtgtgccattgcggctgccaaagagcgtattaacttggccaaactggcggtggaagaaaccggcatcggtctggtcgaggacaagattatcaagaatcactttgccgcggagtatatctacaacaaatacaaaaacgaaaagacttgcggcatcattgatcatgatgacagcttgggtatcacgaaagtcgcagaaccaatcggtattgtcgcggcaattgtcccgaccactaatccgaccagcaccgcgatcttcaagagcttgatcagcctgaaaacccgcaacgcgattttcttcagcccgcacccgcgtgcgaagaagagcaccatcgcagcggcgaagctgattttggatgccgcggttaaggccggtgcaccgaaaaacattattggctggattgacgagccgagcattgagctgtctcaggacctgatgagcgaagcggacattattctggccaccggtggtccgtctatggttaaggcagcgtactccagcggtaagcctgctatcggcgttggtgcgggcaatacgccggctatcatcgatgaaagcgcggatattgatatggcagttagctccatcattctgtccaaaacctacgacaatggtgttatctgtgcaagcgagcaaagcatcctggtgatgaatagcatttacgagaaggtcaaagaagagtttgttaagcgtggttcctatattctgaaccagaacgagattgcaaaaatcaaagaaacgatgtttaagaatggcgcgattaatgcagatattgttggtaagtccgcatacattatcgcgaagatggcgggtatcgaagtgccgcaaaccaccaaaatcttgatcggcgaagtgcagagcgtggagaagagcgaactgttcagccatgagaaactgagcccggttctggctatgtacaaagtgaaggactttgacgaagccctgaagaaagctcagcgtctgattgagctgggcggcagcggtcacacgagcagcctgtatatcgatagccaaaacaataaggacaaggtgaaagagttcggtctggcgatgaaaacctctcgcacgtttatcaacatgccgagcagccaaggtgcgagcggcgatctgtataacttcgcaatcgcgccttcttttacgctgggttgcggtacctggggcggtaattcggtgagccagaatgtcgagccgaagcacctgctgaacatcaaatcggtcgcggagcgccgtgagaagagacctggttcaaagtcccacagaaaatttacttcaaatacggctgcctgcgtttcgcgctgaaagaactgaaagacatgaacaaaaagcgtgcgttcattgttaccgacaaagacctgttcaaactgggttacgtgaacaaaatcaccaaagttctggatgaaattgacatcaagtactccatcttcactgatatcaaatccgacccaacgattgatagcgtgaaaaagggcgctaaagaaatgctgaactttgaaccggacaccatcatcagcatcggtggtggctctcctatggatgctgcgaaggtcatgcacctgctgtacgaatacccggaagcggaaatcgaaaacctggctatcaacttcatggacatccgcaaacgtatctgcaacttcccgaagctgggcactaaagctatttccgttgccatcccgactaccgcgggcactggttccgaagccacgccgttcgccgtgatcaccaacgatgaaaccggtatgaaatacccgctgacctcttacgaactgaccccgaacatggcaattatcgacaccgagctgatgctgaacatgccgcgcaagctgaccgctgctaccggcatcgacgctctggtacatgctattgaggcgtacgtttccgtgatggctaccgattacaccgacgaactggccctgcgtgcgatcaaaatgattttcaagtacctgcctcgcgcttacaaaaacggcacgaatgacatcgaggcgcgtgagaaaatggcccatgcaagcaacatcgcgggcatggccttcgccaacgcgttcctgggcgtgtgccactctatggctcacaaactgggtgctatgcaccacgtgccgcacggtatcgcgtgtgctgtcctgatcgaagaagtaattaagtacaacgctactgattgcccgactaaacagaccgccttcccacagtacaaatctcctaacgctaaacgtaagtacgctgagatcgccgaatacctgaacctgaagggtacgagcgacactgagaaagttactgcgctgatcgaagctatctctaaactgaaaattgacctgtccatcccgcagaacatcagcgccgcaggcatcaacaaaaaggacttttacaacacgctggacaaaatgagcgaactggcttttgacgaccagtgcaccactgcaaacccgcgttacccgctgatctctgagctgaaagacatttatatcaaatctttt

SEQ ID NO: 156 - DNA, 2573 bp, Artificial Sequence
  Synthetic Construct
atgaaagtgacgaaccaaaaagaactgaaacaaaaagacaatgaactgcgtgaggcccagaaaaagttcgctagctatacccaggagcaagttgacaagatcttcaaacagtgtgccattgcggctgccaaagagcgtattaacttggccaaactggcggtggaagaaaccggcatcggtctggtcgaggacaagattatcaagaatcactttgccgcggagtatatctacaacaaatacaaaaacggtaagacttgcggcatcattgatcatgatgacagcttgggtatcacgaaagtcgcagaaccaatcggtattgtcgcggcaattgtcccgaccactaatccgaccagcaccgcgatcttcaagagcttgatcagcctgaaaacccgcaacgcgattttcttcagcccgcacccgcgtgcgaagaagagcaccatcgcagcggcgaagctgattttggatgccgcggttaaggccggtgcaccgaaaaacattattggctggattgacgagccgagcattgagctgtctcaggacctgatgagcgaagcggacattattctggccaccggtggtccgtctatggttaaggcagcgtactccagcggtaagcctgctatcggcgttggtgcgggcaatacgccggctatcatcgatgaaagcgcggatattgatatggcagttagctccatcattctgtccaaaacctacgacaatggtgttatctgtgcaagcgagcaaagcatcctggtgatgaatagcatttacgagaaggtcaaagaagagtttgttaagcgtggttcctatattctgaaccagaacgagattgcaaaaatcaaagaaacgatgtttaagaatggcgcgattaatgcagatattgttggtaagtccgcatacattatcgcgaagatggcgggtatcgaagtgccgcaaaccaccaaaatcttgatcggcgaagtgcagagcgtggagaagagcgaactgttcagccatgagaaactgagcccggttctggctatgtacaaagtgaaggactttgacgaagccctgaagaaagctcagcgtctgattgagctgggcggcagcggtcacacgagcagcctgtatatcgatagccaaaacaataaggacaaggtgaaagagttcggtctggcgatgaaaacctctcgcacgtttatcaacatgccgagcagccaaggtgcgagcggcgatctgtataacttcgcaatcgcgccttcttttacgctgggttgcggtacctggggcggtaattcggtgagccagaatgtcgagccgaagcacctgctgaacatcaaatcggtcgcggagcgccgtgagaagagacctggttcaaagtcccacagaaaatttacttcaaatacggctgcctgcgtttcgcgctgaaagaactgaaagacatgaacaaaaagcgtgcgttcattgttaccgacaaagacctgttcaaactgggttacgtgaacaaaatcaccaaagttctggatgaaattgacatcaagtactccatcttcactgatatcaaatccgacccaacgattgatagcgtgaaaaagggcgctaaagaaatgctgaactttgaaccggacaccatcatcagcatcggtggtggctctcctatggatgctgcgaaggtcatgcacctgctgtacgaatacccggaagcggaaatcgaaaacctggctatcaacttcatggacatccgcaaacgtatctgcaacttcccgaagctgggcactaaagctatttccgttgccatcccgactaccgcgggcactggttccgaagccacgccgttcgccgtgatcaccaacgatgaaaccggtatgaaatacccgctgacctcttacgaactgaccccgaacatggcaattatcgacaccgagctgatgctgaacatgccgcgcaagctgaccgctgctaccggcatcgacgctctggtacatgctattgaggcgtacgtttccgtgatggctaccgattacaccgacgaactggccctgcgtgcgatcaaaatgattttcaagtacctgcctcgcgcttacaaaaacggcacgaatgacatcgaggcgcgtgagaaaatggcccatgcaagcaacatcgcgggcatggccttcgccaacgcgttcctgggcgtgtgccactctatggctcacaaactgggtgctatgcaccacgtgccgcacggtatcgcgtgtgctgtcctgatcgaagaagtaattaagtacaacgctactgattgcccgactaaacagaccgccttcccacagtacaaatctcctaacgctaaacgtaagtacgctgagatcgccgaatacctgaacctgaagggtacgagcgacactgagaaagttactgcgctgatcgaagctatctctaaactgaaaattgacctgtccatcccgcagaacatcagcgccgcaggcatcaacaaaaaggacttttacaacacgctggacaaaatgagcgaactggcttttgacgaccagtgcaccactgcaaacccgcgttacccgctgatctctgagctgaaagacatttatatcaaatctttt

SEQ ID NO: 157 - DNA, 2573 bp, Artificial Sequence
  Synthetic Construct
atgaaagtgacgaaccaaaaagaactgaaacaaaaactgaatgaactgcgtgaggcccagaaaaagttcgctacgtatacccaggagcaagttgacaagatcttcaaacagtgtgccattgcggctgccaaagagcgtattaacttggccaaactggcggtggaagaaaccggcatcggtctggtcgaggacaagattatcaagaatcactttgccgcggagtatatctacaacaaatacaaaaacgaaaagacttgcggcatcattgatcatgatgacagcttgggtatcacgaaagtcgcagaaccaatcggtattgtcgcggcaattgtcccgaccactaatccgaccagcaccgcgatcttcaagagcttgatcagcctgaaaacccgcaacgcgattttcttcagcccgcacccgcgtgcgaagaagagcaccatcgcagcggcgaagctgattttggatgccgcggttaaggccggtgcaccgaaaaacattattggctggattgacgagccgagcattgagctgtctcaggacctgatgagcgaagcggacattattctggccaccggtggtccgtctatggttaaggcagcgtactccagcggtaagcctgctatcggcgttggtgcgggcaatacgccggctatcatcgatgaaagcgcggatattgatatggcagttagctccatcattctgggtaaaacctacgacaatggtgttatctgtgcaagcgagcaaagcatcctggtgatgaatagcatttacgagaaggtcaaagaagagtttgttaagcgtggttcctatattctgaaccagaacgagattgcaaaaatcaaagaaacgatgtttaagaatggcgcgattaatgcagatattgttggtaagtccgcatacattatcgcgaagatggcgggtatcgaagtgccgcaatacaccaaaatcttgatcggcgaagtgcagagcgtggagaagagcgaactgttcagccatgagaaactgagcccggttctggctatgtacaaagtgaaggactttgacgaagccctgaagaaagctcagcgtctgattgagctgggcggcagcggtcacacgagcagcctgtatatcgatagccaaaacaataaggacaaggtgaaagagttcggtctggcgatgaaaacctctcgcacgtttatcaacatgccgagcagccaaggtgcgagcggcgatctgtataacttcgcaatcgcgccttcttttacgctgggttgcggtacctgggagggtaattcggtgagccagaatgtcgagccgaagcacctgctgaacatcaaatcggtcgcggagcgccgtgagaagagacctggttcaaagtcccacagaaaatttacttcaaatacggctgcctgcgtttcgcgctgaaagaactgaaagacatgaacaaaaagcgtgcgttcattgttaccgacaaagacctgttcaaactgggttacgtgaacaaaatcaccaaagttctggatgaaattgacatcaagtactccatcttcactgatatcaaatccgacccaacgattgatagcgtgaaaaagggcgctaaagaaatgctgaactttgaaccggacaccatcatcagcatcggtggtggctctcctatggatgctgcgaaggtcatgcacctgctgtacgaatacccggaagcggaaatcgaaaacctggctatcaacttcatggacatccgcaaacgtatctgcaacttcccgaagctgggcactaaagctatttccgttgccatcccgactaccgcgggcactggttccgaagccacgccgttcgccgtgatcaccaacgatgaaaccggtatgaaatacccgctgacctcttacgaactgaccccgaacatggcaattatcgacaccgagctgatgctgaacatgccgcgcaagctgaccgctgctaccggcatcgacgctctggtacatgctattgaggcgtacgtttccgtgatggctaccgattacaccgacgaactggccctgcgtgcgatcaaaatgattttcaagtacctgcctcgcgcttacaaaaacggcacgaatgacatcgaggcgcgtgagaaaatggcccatgcaagcaacatcgcgggcatggccttcgccaacgcgttcctgggcgtgtgccactctatggctcacaaactgggtgctatgcaccacgtgccgcacggtatcgcgtgtgctgtcctgatcgaagaagtaattaagtacaacgctactgattgcccgactaaacagaccgccttcccacagtacaaatctcctaacgctaaacgtaagtacgctgagatcgccgaatacctgaacctgaagggtacgagcgacactgagaaagttactgcgctgatcgaagctatctctaaactgaaaattgacctgtccatcccgcagaacatcagcgccgcaggcatcaacaaaaaggacttttacaacacgctggacaaaatgagcgaactggcttttgacgaccagtgcaccactgcaaacccgcgttacccgctgatctctgagctgaaagacatttatatcaaatctttt

SEQ ID NO: 158 - DNA, 2573 bp, Artificial Sequence
  Synthetic Construct
atgaaagtgacgaaccaaaaagaactgaaacaaaaactgaatgaactgcgtgaggcccagaaaaagttcgctacgtatacccaggagcaagttgacaagatcttcaaacagtgtgccattgcggctgccaaagagcgtattaacttggccaaactggcggtggaagaaaccggcatcggtctggtcgaggacaagattatcaagaatcactttgccgcggagtatatctacaacaaatacaaaaacgaaaagacttgcggcatcattgatcatgatgacagcttgggtatcacgaaagtcgcagaaccaatcggtattgtcgcggcaattgtcccgaccactaatccgaccagcaccgcgatcttcaagagcttgatcagcctggcgacccgcaacgcgattttcttcagcccgcacccgcgtgcgaagaagagcaccatcgcagcggcgaagctgattttggatgccgcggttaaggccggtgcaccgaaaaacattattggctggattgacgagccgagcattgagctgtctcaggacctgatgagcgaagcggacattattctggccaccggtggtccgtctatggttaaggcagcgtactccagcggtaagcctgctatcggcgcgggtgcgggcaatacgccggctatcatcgatgaaagcgcggatattgatatggcagttagctccatcattctgtccaaaacctacgacaatggtgttatctgtgcaagcgagcaaagcatcctggtgatgaatagcatttacgagaaggtcaaagaagagtttgttaagcgtggttcctatattctgaaccagaacgcgattgcaaaaatcaaagaaacgatgtttaagaatggcgcgattaatgcagatattgttggtaagtccgcatacattatcgcgaagatggcgggtatcgaagtgccgcaaaccaccaaaatcttgatcggcgaagtgcagagcgtggagaagagcgaactgttcagccatgagaaactgagcccggttctggctatgtacaaagtgaaggactttgacgaagccctgaagaaagctcagcgtctgattgagctgggcggcagcggtcacacgagcagcctgtatatcgatagccaaaacaataaggacaaggtgaaagagttcggtctggcgatgaaaacctctcgcacgtttatcaacatgccgagcagccaaggtgcgagcggcgatctgtataacttcgcaatcgcgccttcttttacgctgggttgcggtacctggggcggtaattcggtgagccagaatgtcgagccgaagcacctgctgaacatcaaatcggtcgcggagcgccgtgagaagagacctggttcaaagtcccacagaaaatttacttcaaatacggctgcctgcgtttcgcgctgaaagaactgaaagacatgaacaaaaagcgtgcgttcattgttaccgacaaagacctgttcaaactgggttacgtgaacaaaatcaccaaagttctggatgaaattgacatcaagtactccatcttcactgatatcaaatccgacccaacgattgatagcgtgaaaaagggcgctaaagaaatgctgaactttgaaccggacaccatcatcagcatcggtggtggctctcctatggatgctgcgaaggtcatgcacctgctgtacgaatacccggaagcggaaatcgaaaacctggctatcaacttcatggacatccgcaaacgtatctgcaacttcccgaagctgggcactaaagctatttccgttgccatcccgactaccgcgggcactggttccgaagccacgccgttcgccgtgatcaccaacgatgaaaccggtatgaaatacccgctgacctcttacgaactgaccccgaacatggcaattatcgacaccgagctgatgctgaacatgccgcgcaagctgaccgctgctaccggcatcgacgctctggtacatgctattgaggcgtacgtttccgtgatggctaccgattacaccgacgaactggccctgcgtgcgatcaaaatgattttcaagtacctgcctcgcgcttacaaaaacggcacgaatgacatcgaggcgcgtgagaaaatggcccatgcaagcaacatcgcgggcatggccttcgccaacgcgttcctgggcgtgtgccactctatggctcacaaactgggtgctatgcaccacgtgccgcacggtatcgcgtgtgctgtcctgatcgaagaagtaattaagtacaacgctactgattgcccgactaaacagaccgccttcccacagtacaaatctcctaacgctaaacgtaagtacgctgagatcgccgaatacctgaacctgaagggtacgagcgacactgagaaagttactgcgctgatcgaagctatctctaaactgaaaattgacctgtccatcccgcagaacatcagcgccgcaggcatcaacaaaaaggacttttacaacacgctggacaaaatgagcgaactggcttttgacgaccagtgcaccactgcaaacccgcgttacccgctgatctctgagctgaaagacatttatatcaaatctttt

SEQ ID NO: 159 - DNA, 2573 bp, Artificial Sequence
  Synthetic Construct
atgaaagtgacgaaccaaaaagaactgaaacaaaaactgaatgaactgcgtgaggcccagaaaaagttcgcttgctatacccaggaccaagttgacaagatcttcaaacagtgtgccattgcggctgccaaagagcgtattaacttggccgagctggcggtggaagaaaccggcatcggtctggtcgaggacaagattatcaagaatcactttgccgcggagtatatctacaacaaatacaaaaacgaaaagacttgcggcatcattgatcatgatgacagcttgggtatcacgaaagtcgcagaaccaatcggtattgtcgcggcaattgtcccgaccactaatccgaccagcaccgcgatcttcaagagcttgatcagcctgaaaacccgcaacgcgattttcttcagcccgcacccgcgtgcgaagaagagcaccatcgcagcggcgaagctgattttggatgccgcggttaaggccggtgcaccgaaaaacattattggctggattgacgagccgagcattgagctgtctcaggacctgatgagcgaagcggacattattctggccaccggtggtccgtctatggttaaggcagcgtactccagcggtaagcctgctatcggcgttggtgcgggcaatacgccggctatcatcgatgaaagcgcggatattgatatggcagttagctccatcattctgtccaaaacctacgacaatggtgttatctgtgcaagcgagcaaagcatcctggtgatgaatagcatttacgagaaggtcaaagaagagtttgttaagcgtggttcctatattctgaaccagaacgagattgcaaaaatcaaagaaacgatgtttaagaatggcgcgattaatgcagatattgttggtaagtccgcatacattatcgcgaagatggcgggtatcgaagtgccgcaaaccaccaaaatcttgatcggcgaagtgcagagcgtggagaagagcgaactgttcagccatgagaaactgagcccggttctggctatgtacaaagtgaaggactttgacgaagccctgaagaaagctcagcgtctgattgagctgggcggcagcggtcacacgagcagcctgtatatcgatagccaaaacaataaggacaaggtgaaagagttcggtctggcgatgaaaacctctcgcacgtttatcaacatgccgagcagccaaggtgcgagcggcgatctgtataacttcgcaatcgcgccttcttttacgctgggttgcggtacctggggcggtaattcggtgagccagaatgtcgagccgaagcacctgctgaacatcaaatcggtcgcggagcgccgtgagaagagacctggttcaaagtcccacagaaaatttacttcaaatacggctgcctgcgtttcgcgctgaaagaactgaaagacatgaacaaaaagcgtgcgttcattgttaccgacaaagacctgttcaaactgggttacgtgaacaaaatcaccaaagttctggatgaaattgacatcaagtactccatcttcactgatatcaaatccgacccaacgattgatagcgtgaaaaagggcgctaaagaaatgctgaactttgaaccggacaccatcatcagcatcggtggtggctctcctatggatgctgcgaaggtcatgcacctgctgtacgaatacccggaagcggaaatcgaaaacctggctatcaacttcatggacatccgcaaacgtatctgcaacttcccgaagctgggcactaaagctatttccgttgccatcccgactaccgcgggcactggttccgaagccacgccgttcgccgtgatcaccaacgatgaaaccggtatgaaatacccgctgacctcttacgaactgaccccgaacatggcaattatcgacaccgagctgatgctgaacatgccgcgcaagctgaccgctgctaccggcatcgacgctctggtacatgctattgaggcgtacgtttccgtgatggctaccgattacaccgacgaactggccctgcgtgcgatcaaaatgattttcaagtacctgcctcgcgcttacaaaaacggcacgaatgacatcgaggcgcgtgagaaaatggcccatgcaagcaacatcgcgggcatggccttcgccaacgcgttcctgggcgtgtgccactctatggctcacaaactgggtgctatgcaccacgtgccgcacggtatcgcgtgtgctgtcctgatcgaagaagtaattaagtacaacgctactgattgcccgactaaacagaccgccttcccacagtacaaatctcctaacgctaaacgtaagtacgctgagatcgccgaatacctgaacctgaagggtacgagcgacactgagaaagttactgcgctgatcgaagctatctctaaactgaaaattgacctgtccatcccgcagaacatcagcgccgcaggcatcaacaaaaaggacttttacaacacgctggacaaaatgagcgaactggcttttgacgaccagtgcaccactgcaaacccgcgttacccgctgatctctgagctgaaagacatttatatcaaatctttt

SEQ ID NO: 160 - DNA, 2573 bp, Artificial Sequence
  Synthetic Construct
atgaaagtgacgaaccaaaaagaactgaaacaaaaactgaatgaactgcgtgaggcccagaaaaagttcgctacgtatacccaggagcaagttgacaagttcttcaaacagtgtgccattgcggctgccaaagagcgtattaacttggccaaactggcggtggaagaaaccggcatcggtctggtcgaggacaagattatcaagaatcactttgccgcggagtatatctacaacaaatacaaaaacgaaaagacttgcggcatcattgatcatgatgacagcttgggtatcacgaaagtcgcagaaccaatcggtattgtcgcggcaattgtcccgaccactaatccgaccagcaccgcgatcttcaagagcttgatcagcctgaaaacccgcaacgcgattttcttcagcccgcacccgcgtgcgaagaagagcaccatcgcagcggcgaagctgattttggatgccgcggttaaggccggtgcaccgaaaaacattattggctggattgacgagccgagcattgagctgtctcaggacctgatgagcgaagcggacattattctggccaccggtggtccgtctatggttaaggcagcgtactccagcggtaagcctgctatcggcgttggtgcgggcaatacgccggctatcatcgatgaaagcgcggatattgatatggcagttagctccatcattctgtccaaaacctacgacaatggtgttatctgtgcaagcgagcaaagcatcctggtgatgaatagcatttacgagaaggtcaaagaagagtttgttaagcgtggttcctatattctgaaccagaacgagattgcaaaaatcaaagaaacgatgtttaagaatggcgcgattaatgcagatattgttggtaagtccgcatacattatcgcgaagatggcgggtatcgaagtgccgcaaaccaccaaaatcttgatcggcgaagtgcagagcgtggagaagagcgaactgttcagccatgagaaactgagcccggttctggctatgtacaaagtgaaggactttgacgaagccctgaagaaagctcagcgtctgattgagctgggcggcagcggtcacacgagcagcctgtatatcgatagccaaaacaataaggacaaggtgaaagagttcggtctggagatgaaaacctctcgcttctttatcaacatgccgagcagccaaggtgcgagcggcgatctgtataacttcgcaatcgcgccttcttttacgctgggttgcggtacctggggcggtaattcggtgagccagaatgtcgagccgaagcacctgctgaacatcaaatcggtcgcggagcgccgtgagaagagacctggttcaaagtcccacagaaaatttacttcaaatacggctgcctgcgtttcgcgctgaaagaactgaaagacatgaacaaaaagcgtgcgttcattgttaccgacaaagacctgttcaaactgggttacgtgaacaaaatcaccaaagttctggatgaaattgacatcaagtactccatcttcactgatatcaaatccgacccaacgattgatagcgtgaaaaagggcgctaaagaaatgctgaactttgaaccggacaccatcatcagcatcggtggtggctctcctatggatgctgcgaaggtcatgcacctgctgtacgaatacccggaagcggaaatcgaaaacctggctatcaacttcatggacatccgcaaacgtatctgcaacttcccgaagctgggcactaaagctatttccgttgccatcccgactaccgcgggcactggttccgaagccacgccgttcgccgtgatcaccaacgatgaaaccggtatgaaatacccgctgacctcttacgaactgaccccgaacatggcaattatcgacaccgagctgatgctgaacatgccgcgcaagctgaccgctgctaccggcatcgacgctctggtacatgctattgaggcgtacgtttccgtgatggctaccgattacaccgacgaactggccctgcgtgcgatcaaaatgattttcaagtacctgcctcgcgcttacaaaaacggcacgaatgacatcgaggcgcgtgagaaaatggcccatgcaagcaacatcgcgggcatggccttcgccaacgcgttcctgggcgtgtgccactctatggctcacaaactgggtgctatgcaccacgtgccgcacggtatcgcgtgtgctgtcctgatcgaagaagtaattaagtacaacgctactgattgcccgactaaacagaccgccttcccacagtacaaatctcctaacgctaaacgtaagtacgctgagatcgccgaatacctgaacctgaagggtacgagcgacactgagaaagttactgcgctgatcgaagctatctctaaactgaaaattgacctgtccatcccgcagaacatcagcgccgcaggcatcaacaaaaaggacttttacaacacgctggacaaaatgagcgaactggcttttgacgaccagtgcaccactgcaaacccgcgttacccgctgatctctgagctgaaagacatttatatcaaatctttt

SEQ ID NO: 161 - DNA, 2573 bp, Artificial Sequence
  Synthetic Construct
atgaaagtgacgaaccaaaaagaactgaaacaaaaactgaatgaactgcgtgaggcccagaaaaagttcgctacgtatacccaggagcaagttgacaagatcttcaaacagtgtgccattgcggctgccaaagagcgtattaacttggccaaactggcggtggaagaaaccggcatcggtctggtcgaggacaagattatcaagaatcactttgccgcggagtatatctacaacaaatacaaaaacgaaaagacttgcggcatcattgatcatgatgacagcttgggtatcacgaaagtcgcagaaccaatcggtattgtcgcggcaattgtcccgaccactaatccgaccagcaccgcgatcttcaagagcttgatcagcctgaaaacccgcaacgcgattttcttcagcccgcacccgcgtgcgaagaagagcaccatcgcagcggcgaagctgattttggatgccgcggttaaggccggtgcaccgaaaaacattattggctggattgacgagccgagcattgagctgtctcaggacctgatgagcgaagcggacattattctggccaccggtggtccgtctatggttaaggcagcgtactccagcggtaagcctgctatcggcgttggtgcgggcaatacgccggctatcatcgatgaaagcgcggatattgatatggcagttagctccatcattctgtccaaaacctacgacaatggtgttatctgtgcaagcgagcaaagcatcctggtgatgaatagcatttacgagaaggtcaaagcggagtttgttaagcgtggttcctatattctgaaccaggaggagattgcaaaaatcaaagaaacgatgtttaagaatggcgcgattaatgcagatattgttggtaagtccgcatacattatcgcgaagatggcgggtatcgaagtgccgcaaaccaccaaaatcttgatcggcgaagtgcagagcgtggagaagagcgaactgttcagccatgagaaactgagcccggttctggctatgtacaaagtgaaggactttgacgaagccctgaagctggctcagcgtctgattgagctgggcggcagcggtcacacgagcagcctgtatatcgatagccaaaacaataaggacaaggtgaaagagttcggtctggcgatgaaaacctctcgcacgtttatcaacatgccgagcagccaaggtgcgagcggcgatctgtataacttcgcaatcgcgccttcttttacgctgggttgcggtacctggggcggtaattcggtgagccagaatgtcgagccgaagcacctgctgaacatcaaatcggtcgcggagcgccgtgagaagagacctggttcaaagtcccacagaaaatttacttcaaatacggctgcctgcgtttcgcgctgaaagaactgaaagacatgaacaaaaagcgtgcgttcattgttaccgacaaagacctgttcaaactgggttacgtgaacaaaatcaccaaagttctggatgaaattgacatcaagtactccatcttcactgatatcaaatccgacccaacgattgatagcgtgaaaaagggcgctaaagaaatgctgaactttgaaccggacaccatcatcagcatcggtggtggctctcctatggatgctgcgaaggtcatgcacctgctgtacgaatacccggaagcggaaatcgaaaacctggctatcaacttcatggacatccgcaaacgtatctgcaacttcccgaagctgggcactaaagctatttccgttgccatcccgactaccgcgggcactggttccgaagccacgccgttcgccgtgatcaccaacgatgaaaccggtatgaaatacccgctgacctcttacgaactgaccccgaacatggcaattatcgacaccgagctgatgctgaacatgccgcgcaagctgaccgctgctaccggcatcgacgctctggtacatgctattgaggcgtacgtttccgtgatggctaccgattacaccgacgaactggccctgcgtgcgatcaaaatgattttcaagtacctgcctcgcgcttacaaaaacggcacgaatgacatcgaggcgcgtgagaaaatggcccatgcaagcaacatcgcgggcatggccttcgccaacgcgttcctgggcgtgtgccactctatggctcacaaactgggtgctatgcaccacgtgccgcacggtatcgcgtgtgctgtcctgatcgaagaagtaattaagtacaacgctactgattgcccgactaaacagaccgccttcccacagtacaaatctcctaacgctaaacgtaagtacgctgagatcgccgaatacctgaacctgaagggtacgagcgacactgagaaagttactgcgctgatcgaagctatctctaaactgaaaattgacctgtccatcccgcagaacatcagcgccgcaggcatcaacaaaaaggacttttacaacacgctggacaaaatgagcgaactggcttttgacgaccagtgcaccactgcaaacccgcgttacccgctgatctctgagctgaaagacatttatatcaaatctttt

SEQ ID NO: 162 - DNA, 2573 bp, Artificial Sequence
  Synthetic Construct
atgaaagtgacgaaccaaaaagaactgaaacaaaaactgaatgaactgcgtgaggcccagaaaaagttcgctacgtatacccaggagcaagttgacaagatcttcaaacagtgtgccattgcggctgccaaagagcgtattaacttggccaaactggcggtggaagaaaccggcatcggtctggtcgaggacaagattatcaagaatcactttgccgcggagtatatctacaacaaatacaaaaacgaaaagacttgcggcatcattgatcatgatgacagcttgggtatcacgaaagtcgcagaaccaatcggtattgtcgcggcaattgtcccgaccactaatccgaccagcaccgcgatcttcaagagcttgatcagcctgaaaacccgcaacgcgattttcttcagcccgcacccgcgtgcgaagaagagcaccatcgcagcggcgaagctgattttggatgccgcggttaaggccggtgcaccgaaaaacattattggctggattgacgagccgagcattgagctgtctcaggacctgatgagcgaagcggacattattctggccaccggtggtccgtctatggttaaggcagcgtactccagcggtaagcctgctatcggcgttggtgcgggcaatacgccggctatcatcgatgaaagcgcggatattgatatggcagttagctccatcattctgtccaaaacctacgacaatggtgttatctgtgcaagcgagcaaagcatcctggtgatgaatagcatttacgagaaggtcaaagaagagtttgttaagcgtggttcctatattctgaaccagaacgagattgcaaaaatcaaagaaacgatgtttaagaatggcgcgattaatgcagatattgttggtaagtccgcatacattatcgcgaagatggcgggtatcgaagtgccgcaatacaccaaaatcttgatcggcgaagtgcagcacgtggagaagagcgaactgttcagccatgagaaactgagcccggttctggctatgtacaaagtgaaggactttgacgaagccctgaagaaagctcagcgtctgattgagctgggcggcagcggtcacacgagcagcctgtatatcgatagccaaaacaataaggacaaggtgaaagagttcggtctggcgatgaaaacctctcgcacgtttatcaacatgccgagcagccaaggtgcgagcggcgatctgtataacttcgcaatcgcgccttcttttacgctgggttgcccgacctggggcggtaattcggtgagccagaatgtcgagccgaagcacctgctgaacatcaaatcggtcgcggagcgccgtgagaagagacctggttcaaagtcccacagaaaatttacttcaaatacggctgcctgcgtttcgcgctgaaagaactgaaagacatgaacaaaaagcgtgcgttcattgttaccgacaaagacctgttcaaactgggttacgtgaacaaaatcaccaaagttctggatgaaattgacatcaagtactccatcttcactgatatcaaatccgacccaacgattgatagcgtgaaaaagggcgctaaagaaatgctgaactttgaaccggacaccatcatcagcatcggtggtggctctcctatggatgctgcgaaggtcatgcacctgctgtacgaatacccggaagcggaaatcgaaaacctggctatcaacttcatggacatccgcaaacgtatctgcaacttcccgaagctgggcactaaagctatttccgttgccatcccgactaccgcgggcactggttccgaagccacgccgttcgccgtgatcaccaacgatgaaaccggtatgaaatacccgctgacctcttacgaactgaccccgaacatggcaattatcgacaccgagctgatgctgaacatgccgcgcaagctgaccgctgctaccggcatcgacgctctggtacatgctattgaggcgtacgtttccgtgatggctaccgattacaccgacgaactggccctgcgtgcgatcaaaatgattttcaagtacctgcctcgcgcttacaaaaacggcacgaatgacatcgaggcgcgtgagaaaatggcccatgcaagcaacatcgcgggcatggccttcgccaacgcgttcctgggcgtgtgccactctatggctcacaaactgggtgctatgcaccacgtgccgcacggtatcgcgtgtgctgtcctgatcgaagaagtaattaagtacaacgctactgattgcccgactaaacagaccgccttcccacagtacaaatctcctaacgctaaacgtaagtacgctgagatcgccgaatacctgaacctgaagggtacgagcgacactgagaaagttactgcgctgatcgaagctatctctaaactgaaaattgacctgtccatcccgcagaacatcagcgccgcaggcatcaacaaaaaggacttttacaacacgctggacaaaatgagcgaactggcttttgacgaccagtgcaccactgcaaacccgcgttacccgctgatctctgagctgaaagacatttatatcaaatctttt

SEQ ID NO: 163 - DNA, 2573 bp, Artificial Sequence
  Synthetic Construct
atgaaagtgacgaaccaaaaagaactgaaacaaaaactgaatgaactgcgtgaggcccagaaaaagttcctgacgtatacccaggagcaagttgacaagatcttcaaacagtgtgccattgcggctgccaaagagcgtattaacttggccaaactggcggtggaagaaaccggcatcggtctggtcgaggacaagattatcaagaatcactttgccgcggagtatatctacaacaaatacaaaaacgaaaagacttgcggcatcattgatcatgatgacagcttgggtatcacgaaagtcgcagaaccaatcggtattgtcgcggcaattgtcccgaccactaatccgaccagcaccgcgatcttcaagagcttgatcagcctgaaaacccgcaacgcgattttcttcagcccgcacccgcgtgcgaagaagagcaccatcgcagcggcgaagctgattttggatgccgcggttaaggccggtgcaccgaaaaacattattggctggattgacgagccgagcattgagctgtctcaggacctgatgagcgaagcggacattattctggccaccggtggtccgtctatggttaaggcagcgtactccagcggtaagcctgctatcggcgttggtgcgggcaatacgccggctatcatcgatgaaagcgcggatattgatatggcagttagctccatcattctgtccaaaacctacgacaatggtgttatctgtgcaagcgagcaaagcatcctggtgatgaatagcatttacgagaaggtcaaagaagagtttgttaagcgtggttcctatattctgaaccagaacgagattgcaaaaatcaaagaaacgatgtttaagaatggcgcgattaatgcagatattgttggtaagtccgcatacattatcgcgaagatggcgggtatcgaagtgccgcaaaccaccaaaatcttgatcggcgaagtgcagagcgtggagaagagcgaactgttcagccatgagctgctgagcccggttctggctatgtacaaagtgaaggactttgacgaagccctgaagaaagctcagcgtctgattaacctgggcggcagcggtcacacgagcagcctgtatatcgatagccaaaacaataaggacaaggtgaaagagttcggtctggcgatgaaaacctctcgcacgtttatcaacatgccgagcagccaaggtgcgagcggcgatctgtataacttcgcaatcgcgccttcttttacgctgggttgcggtacctggggcggtaattcggtgagccagaatgtcgagccgaagcacctgctgaacatcaaatcggtcgcggagcgccgtgagaagagacctggttcaaagtcccacagaaaatttacttcaaatacggctgcctgcgtttcgcgctgaaagaactgaaagacatgaacaaaaagcgtgcgttcattgttaccgacaaagacctgttcaaactgggttacgtgaacaaaatcaccaaagttctggatgaaattgacatcaagtactccatcttcactgatatcaaatccgacccaacgattgatagcgtgaaaaagggcgctaaagaaatgctgaactttgaaccggacaccatcatcagcatcggtggtggctctcctatggatgctgcgaaggtcatgcacctgctgtacgaatacccggaagcggaaatcgaaaacctggctatcaacttcatggacatccgcaaacgtatctgcaacttcccgaagctgggcactaaagctatttccgttgccatcccgactaccgcgggcactggttccgaagccacgccgttcgccgtgatcaccaacgatgaaaccggtatgaaatacccgctgacctcttacgaactgaccccgaacatggcaattatcgacaccgagctgatgctgaacatgccgcgcaagctgaccgctgctaccggcatcgacgctctggtacatgctattgaggcgtacgtttccgtgatggctaccgattacaccgacgaactggccctgcgtgcgatcaaaatgattttcaagtacctgcctcgcgcttacaaaaacggcacgaatgacatcgaggcgcgtgagaaaatggcccatgcaagcaacatcgcgggcatggccttcgccaacgcgttcctgggcgtgtgccactctatggctcacaaactgggtgctatgcaccacgtgccgcacggtatcgcgtgtgctgtcctgatcgaagaagtaattaagtacaacgctactgattgcccgactaaacagaccgccttcccacagtacaaatctcctaacgctaaacgtaagtacgctgagatcgccgaatacctgaacctgaagggtacgagcgacactgagaaagttactgcgctgatcgaagctatctctaaactgaaaattgacctgtccatcccgcagaacatcagcgccgcaggcatcaacaaaaaggacttttacaacacgctggacaaaatgagcgaactggcttttgacgaccagtgcaccactgcaaacccgcgttacccgctgatctctgagctgaaagacatttatatcaaatctttt

SEQ ID NO: 164 - DNA, 2573 bp, Artificial Sequence
  Synthetic Construct
atgaaagtgacgaaccaaaaagaactgaaacaaaaactgaatgaactgcgtgaggcccagaaaaagttcgctacgtatacccaggaccaagttgacaagatcttcaaacagtgtgccattgcggctgccaaagagcgtattaacttggccaaactggcggtggaagaaaccggcatcggtctggtcgaggacaagattatcaagaatcactttgccgcggagtatatctacaacaaatacaaaaacgaaaagacttgcggcatcattgatcatgatgacagcttgggtatcacgaaagtcgcagaaccaatcggtattgtcgcggcaattgtcccgaccactaatccgaccagcaccgcgatcttcaagagcttgatcagcctgaaaacccgcaacgcgattttcttcagcccgcacccgcgtgcgaagaagagcaccatcgcagcggcgaccctgattttggatgccgcggttaaggccggtgcaccgaaaaacattattggctggattgacgagccgagcattgagctgtctcaggacctgatgagcgaagcggacattattctggccaccggtggtccgtctatggttaaggcagcgtactccagcggtaagcctgctatcggcgttggtgcgggcaatacgccggctatcatcgatgaaagcgcggatattgatatggcagttagctccatcattctgtccaaaacctacgacaatggtgttatctgtgcaagcgagcaaagcatcctggtgatgaatagcatttacgagaaggtcaaagaagagtttgttaagcgtggttcctatattctgaaccagcaggagattgcaaaaatcaaagaaacgatgtttaagaatggcgcgattaatgcagatattgttggtaagtccgcatacattatcgcgaagatggcgggtatcgaagtgccgcaaaccaccaaaatcttgatcggcgaagtgcagagcgtggagaagagcgaactgttcagccatgagaaactgagcccggttctggctatgtacaaagtgaaggactttgacgaagccctgaagaaagctcagcgtctgattgagctgggcggcagcggtcacacgagcagcctgtatatcgatagccaaaacaataaggacaaggtgaaagagttcggtctggcgatgaaaacctctcgcacgtttatcaacatgccgagcagccaaggtgcgagcggcgatctgtataacttcgcaatcgcgccttcttttacgctgggttgcggtacctggggcggtaattcggtgagccagaatgtcgagccgaagcacctgctgaacatcaaatcggtcgcggagcgccgtgagaagagacctggttcaaagtcccacagaaaatttacttcaaatacggctgcctgcgtttcgcgctgaaagaactgaaagacatgaacaaaaagcgtgcgttcattgttaccgacaaagacctgttcaaactgggttacgtgaacaaaatcaccaaagttctggatgaaattgacatcaagtactccatcttcactgatatcaaatccgacccaacgattgatagcgtgaaaaagggcgctaaagaaatgctgaactttgaaccggacaccatcatcagcatcggtggtggctctcctatggatgctgcgaaggtcatgcacctgctgtacgaatacccggaagcggaaatcgaaaacctggctatcaacttcatggacatccgcaaacgtatctgcaacttcccgaagctgggcactaaagctatttccgttgccatcccgactaccgcgggcactggttccgaagccacgccgttcgccgtgatcaccaacgatgaaaccggtatgaaatacccgctgacctcttacgaactgaccccgaacatggcaattatcgacaccgagctgatgctgaacatgccgcgcaagctgaccgctgctaccggcatcgacgctctggtacatgctattgaggcgtacgtttccgtgatggctaccgattacaccgacgaactggccctgcgtgcgatcaaaatgattttcaagtacctgcctcgcgcttacaaaaacggcacgaatgacatcgaggcgcgtgagaaaatggcccatgcaagcaacatcgcgggcatggccttcgccaacgcgttcctgggcgtgtgccactctatggctcacaaactgggtgctatgcaccacgtgccgcacggtatcgcgtgtgctgtcctgatcgaagaagtaattaagtacaacgctactgattgcccgactaaacagaccgccttcccacagtacaaatctcctaacgctaaacgtaagtacgctgagatcgccgaatacctgaacctgaagggtacgagcgacactgagaaagttactgcgctgatcgaagctatctctaaactgaaaattgacctgtccatcccgcagaacatcagcgccgcaggcatcaacaaaaaggacttttacaacacgctggacaaaatgagcgaactggcttttgacgaccagtgcaccactgcaaacccgcgttacccgctgatctctgagctgaaagacatttatatcaaatctttt

SEQ ID NO: 165 - DNA, 2573 bp, Artificial Sequence
  Synthetic Construct
atgaaagtgacgaaccaaaaagaactgaaacaaaaactgaatgaactgcgtgaggcccagaaaaagttcgctagctatacccaggagcaagttgacaagatcttcaaacagtgtgccattgcggctgccaaagagcgtattaacttggccaaactggcggtggaagaaaccggcatcggtctggtcgaggacaagattatcaagaatcactttgccgcggagtatatctacaacaaatacaaaaacgaaaagacttgcggcatcattgatcatgatgacagcttgggtatcacgaaagtcgcagaaccaatcggtattgtcgcgagcattgtcccgaccactaatccgaccagcaccgcgatcttcaagagcttgatcagcctgaaaacccgcaacgcgattttcttcagcccgcacccgcgtgcgaagaagagcaccatcgcagcggcgaagctgattttggatgccgcggttaaggccggtgcaccgaaaaacattattggctggattgacgagccgagcattgagctgtctcaggacctgatgagcgaagcggacattattctggccaccggtggtccgtctatggttaaggcagcgtactccagcggtaagcctgctatcggcgttggtgcgggcaatacgccggctatcatcgatgaaagcgcggatattgatatggcagttagctccatcattctgggtaaaacctacgacaatggtgttatctgtgcaagcgagcaaagcatcctggtgatgaatagcatttacgagaaggtcaaagaagagtttgttaagcgtggttcctatattctgaaccagaacgagattgcaaaaatcaaagaaacgatgtttaagaatggcgcgattaatgcagatattgttggtaagtccgcatacattatcgcgaagatggcgggtatcgaagtgccgcaaaccaccaaaatcttgatcggcgaagtgcagagcgtggagaagagcgaactgttcagccatgagaaactgagcccggttctggctatgtacaaagtgaaggactttgacgaagccctgaagaaagctcagcgtctgattgagctgggcggcagcggtcacacgagcagcctgtatatcgatagccaaaacaataaggacaaggtgaaagagttcggtctggcgatgaaaacctctcgcacgtttatcaacatgccgagcagccaaggtgcgagcggcgatctgtataacttcgcaatcgcgccttcttttacgctgggttgcggtacctggggcggtaattcggtgagccagaatgtcgagccgaagcacctgctgaacatcaaatcggtcgcggagcgccgtgagaagagacctggttcaaagtcccacagaaaatttacttcaaatacggctgcctgcgtttcgcgctgaaagaactgaaagacatgaacaaaaagcgtgcgttcattgttaccgacaaagacctgttcaaactgggttacgtgaacaaaatcaccaaagttctggatgaaattgacatcaagtactccatcttcactgatatcaaatccgacccaacgattgatagcgtgaaaaagggcgctaaagaaatgctgaactttgaaccggacaccatcatcagcatcggtggtggctctcctatggatgctgcgaaggtcatgcacctgctgtacgaatacccggaagcggaaatcgaaaacctggctatcaacttcatggacatccgcaaacgtatctgcaacttcccgaagctgggcactaaagctatttccgttgccatcccgactaccgcgggcactggttccgaagccacgccgttcgccgtgatcaccaacgatgaaaccggtatgaaatacccgctgacctcttacgaactgaccccgaacatggcaattatcgacaccgagctgatgctgaacatgccgcgcaagctgaccgctgctaccggcatcgacgctctggtacatgctattgaggcgtacgtttccgtgatggctaccgattacaccgacgaactggccctgcgtgcgatcaaaatgattttcaagtacctgcctcgcgcttacaaaaacggcacgaatgacatcgaggcgcgtgagaaaatggcccatgcaagcaacatcgcgggcatggccttcgccaacgcgttcctgggcgtgtgccactctatggctcacaaactgggtgctatgcaccacgtgccgcacggtatcgcgtgtgctgtcctgatcgaagaagtaattaagtacaacgctactgattgcccgactaaacagaccgccttcccacagtacaaatctcctaacgctaaacgtaagtacgctgagatcgccgaatacctgaacctgaagggtacgagcgacactgagaaagttactgcgctgatcgaagctatctctaaactgaaaattgacctgtccatcccgcagaacatcagcgccgcaggcatcaacaaaaaggacttttacaacacgctggacaaaatgagcgaactggcttttgacgaccagtgcaccactgcaaacccgcgttacccgctgatctctgagctgaaagacatttatatcaaatctttt

SEQ ID NO: 166 - DNA, 2573 bp, Artificial Sequence
  Synthetic Construct
atgaaagtgacgaaccaaaaagaactgaaacaaaaactgaatgaactgcgtgaggcccagaaaaagttcgctagctatacccaggagcaagttgacaagatcttcaaacagtgtgccattgcggctgccaaagagcgtattaacttggccaaactggcggtggaagaaaccggcatcggtctggtcgaggacaagattatcaagaatcactttgccgcggagtatatctacaacaaatacaaaaacgaaaagacttgcggcatcattgatcatgatgacagcttgggtatcacgaaagtcgcagaaccaatcggtattgtcgcggcaattgtcccgaccactaatccgaccagcaccgcgatcttcaagagcttgatcagcctgaaaacccgcaacgcgattttcttcagcccgcacccgcgtgcgaagaagagcaccatcgcagcggcgaagctgattttggatgccgcggttaaggccggtgcaccgaaaaacattattggctggattgacgagccgagcattgagctgtctcaggacctgatgagcgaagcggacattattctggccaccggtggtccgtctatggttaaggcagcgtactccagcggtaagcctgctatcggcgttggtgcgggcaatacgccggctatcatcgatgaaagcgcggatattgatatggcagttagctccatcattctgtccaaaacctacgacaatggtgttatctgtgcaagcgagcaaagcatcctggtgatgaatagcatttacgagaaggtcaaagaagagtttgttaagcgtggttcctatattctgaaccagaacgagattgcaaaaatcaaagaaacgatgtttaagaatggcgcgattaatcgtgatattgttggtaagtccgcatacattatcgcgaagatggcgggtatcgaagtgccgcaaaccaccaaaatcttgatcggcgaagtgcagagcgtggagaagagcgaactgttcagcaaagagaaactgagcccggttctggctatgtacaaagtgaaggactttgacgaagccctgaagaaagctcagcgtctgattgagctgggcggcagcggtcacacgagcagcctgtatatcgatagccaaaacaataaggacaaggtgaaagagttcggtctggcgatgaaaacctctcgcacgtttatcaacatgccgagcagccaaggtgcgagcggcgatctgtataacttcgcaatcgcgccttcttttacgctgggttgcggtacctggggcggtaattcggtgagccagaatgtcgagccgaagcacctgctgaacatcaaatcggtcgcggagcgccgtgagaagagacctggttcaaagtcccacagaaaatttacttcaaatacggctgcctgcgtttcgcgctgaaagaactgaaagacatgaacaaaaagcgtgcgttcattgttaccgacaaagacctgttcaaactgggttacgtgaacaaaatcaccaaagttctggatgaaattgacatcaagtactccatcttcactgatatcaaatccgacccaacgattgatagcgtgaaaaagggcgctaaagaaatgctgaactttgaaccggacaccatcatcagcatcggtggtggctctcctatggatgctgcgaaggtcatgcacctgctgtacgaatacccggaagcggaaatcgaaaacctggctatcaacttcatggacatccgcaaacgtatctgcaacttcccgaagctgggcactaaagctatttccgttgccatcccgactaccgcgggcactggttccgaagccacgccgttcgccgtgatcaccaacgatgaaaccggtatgaaatacccgctgacctcttacgaactgaccccgaacatggcaattatcgacaccgagctgatgctgaacatgccgcgcaagctgaccgctgctaccggcatcgacgctctggtacatgctattgaggcgtacgtttccgtgatggctaccgattacaccgacgaactggccctgcgtgcgatcaaaatgattttcaagtacctgcctcgcgcttacaaaaacggcacgaatgacatcgaggcgcgtgagaaaatggcccatgcaagcaacatcgcgggcatggccttcgccaacgcgttcctgggcgtgtgccactctatggctcacaaactgggtgctatgcaccacgtgccgcacggtatcgcgtgtgctgtcctgatcgaagaagtaattaagtacaacgctactgattgcccgactaaacagaccgccttcccacagtacaaatctcctaacgctaaacgtaagtacgctgagatcgccgaatacctgaacctgaagggtacgagcgacactgagaaagttactgcgctgatcgaagctatctctaaactgaaaattgacctgtccatcccgcagaacatcagcgccgcaggcatcaacaaaaaggacttttacaacacgctggacaaaatgagcgaactggcttttgacgaccagtgcaccactgcaaacccgcgttacccgctgatctctgagctgaaagacatttatatcaaatctttt

SEQ ID NO: 167 - DNA, 2573 bp, Artificial Sequence
  Synthetic Construct
atgaaagtgacgaaccaaaaagaactgaaacaaaaagacaatgaactgcgtgaggcccagaaaaagttcgctacgtatacccaggagcaagttgacaagatcttcaaacagtgtgccattgcggctgccaaagagcgtattaacttggccaaactggcggtggaagaaaccggcatcggtctggtcgaggacaagattatcaagaatcactttgccgcggagtatatctacaacaaatacaaaaacgaaaagacttgcggcatcattgatcatgatgacagcttgggtatcacgaaagtcgcagaaccaatcggtattgtcgcggcaattgtcccgaccactaatccgaccagcaccgcgatcttcaagagcttgatcagcctgaaaacccgcaacgcgattttcttcagcccgcacccgcgtgcgaagaagagcaccatcgcagcggcgaagctgattttggatgccgcggttaaggccggtgcaccgaaaaacattattggctggattgacgagccgagcattgagctgtctcaggacctgatgagcgaagcggacattattctggccaccggtggtccgtctatggttaaggcagcgtactccagcggtaagcctgctatcggcgttggtgcgggcaatacgccggctatcatcgatgaaagcgcggatattgatatggcagttagctccatcattctgtccaaaacctacgacaatggtgttatctgtgcaagcgagcaaagcatcctggtgatgaatagcatttacgagaaggtcaaagaagagtttgttaagcgtggttcctatattctgaaccagaacgagattgcaaaaatcaaagaaacgatgtttaagaatggcgcgattaatgcagatattgttggtaagtccgcatacattatcgcgaagatggcgggtatcgaagtgccgcaaaccaccaaaatcttgatcggcgaagtgcagagcgtggagaagagcgaactgttcagccatgagaaactgagcccggttctggctatgtacaaagtgaaggactttgacgaagccctgaagaaagctcagcgtctgattgagctgggcggcagcggtcacacgagcagcctgtatagcgatagccaaaacaataaggacaaggtgaaagagttcggtctggagatgaaaacctctcgcacgtttatcaacatgccgagcagccaaggtgcgagcggcgatctgtataacttcgcaatcgcgccttcttttacgctgggttgcggtacctggggcggtaattcggtgagccagaatgtcgagccgaagcacctgctgaacatcaaatcggtcgcggagcgccgtgagaagagacctggttcaaagtcccacagaaaatttacttcaaatacggctgcctgcgtttcgcgctgaaagaactgaaagacatgaacaaaaagcgtgcgttcattgttaccgacaaagacctgttcaaactgggttacgtgaacaaaatcaccaaagttctggatgaaattgacatcaagtactccatcttcactgatatcaaatccgacccaacgattgatagcgtgaaaaagggcgctaaagaaatgctgaactttgaaccggacaccatcatcagcatcggtggtggctctcctatggatgctgcgaaggtcatgcacctgctgtacgaatacccggaagcggaaatcgaaaacctggctatcaacttcatggacatccgcaaacgtatctgcaacttcccgaagctgggcactaaagctatttccgttgccatcccgactaccgcgggcactggttccgaagccacgccgttcgccgtgatcaccaacgatgaaaccggtatgaaatacccgctgacctcttacgaactgaccccgaacatggcaattatcgacaccgagctgatgctgaacatgccgcgcaagctgaccgctgctaccggcatcgacgctctggtacatgctattgaggcgtacgtttccgtgatggctaccgattacaccgacgaactggccctgcgtgcgatcaaaatgattttcaagtacctgcctcgcgcttacaaaaacggcacgaatgacatcgaggcgcgtgagaaaatggcccatgcaagcaacatcgcgggcatggccttcgccaacgcgttcctgggcgtgtgccactctatggctcacaaactgggtgctatgcaccacgtgccgcacggtatcgcgtgtgctgtcctgatcgaagaagtaattaagtacaacgctactgattgcccgactaaacagaccgccttcccacagtacaaatctcctaacgctaaacgtaagtacgctgagatcgccgaatacctgaacctgaagggtacgagcgacactgagaaagttactgcgctgatcgaagctatctctaaactgaaaattgacctgtccatcccgcagaacatcagcgccgcaggcatcaacaaaaaggacttttacaacacgctggacaaaatgagcgaactggcttttgacgaccagtgcaccactgcaaacccgcgttacccgctgatctctgagctgaaagacatttatatcaaatctttt

SEQ ID NO: 168 - DNA, 2573 bp, Artificial Sequence
  Synthetic Construct
atgaaagtgacgaaccaaaaagaactgaaacaaaaactgaatgaactgcgtgaggcccagaaaaagttcgctacgtatacccaggagcaagttgacaagttcttcaaacagtgtgccattgcggctgccaaataccgtattaacttggccaaactggcggtggaagaaaccggcatcggtctggtcgaggacaagattatcaagaatcactttgccgcggagtatatctacaacaaagagaaaaacgaaaagacttgcggcatcattgatcatgatgacagcttgggtatcacgaaagtcgcagaaccaatcggtattgtcgcggcaattgtcccgaccactaatccgaccagcaccgcgatcttcaagagcttgatcagcctgaaaacccgcaacgcgattttcttcagcccgcacccgcgtgcgaagaagagcaccatcgcagcggcgaagctgattttggatgccgcggttaaggccggtgcaccgaaaaacattattggctggattgacgagccgagcattgagctgtctcaggacctgatgagcgaagcggacattattctggccaccggtggtccgtctatggttaaggcagcgtactccagcggtaagcctgctatcggcgttggtgcgggcaatacgccggctatcatcgatgaaagcgcggatattgatatggcagttagctccatcattctgtccaaaacctacgacaatggtgttatctgtgcaagcgagcaaagcatcctggtgatgaatagcatttacgagaaggtcaaagaagagtttgttaagcgtggttcctatattctgaaccagaacgagattgcaaaaatcaaagaaacgatgtttaagaatggcgcgattaatgcagatattgttggtaagtccgcatacattatcgcgaagatggcgggtatcgaagtgccgcaaaccaccaaaatcttgatcggcgaagtgcagagcgtggagaagagcgaactgttcagccatgagaaactgagcccggttctggctatgtacaaagtgaaggactttgacgaagccctgaagaaagctcagcgtctgattgagctgggcggcagcggtcacacgagcagcctgtatatcgatagccaaaacaataaggacaaggtgaaagagttcggtctggcgatgaaaacctctcgcacgtttatcaacatgccgagcagccaaggtgcgagcggcgatctgtataacttcgcaatcgcgccttcttttacgctgggttgcggtacctggggcggtaattcggtgagccagaatgtcgagccgaagcacctgctgaacatcaaatcggtcgcggagcgccgtgagaagagacctggttcaaagtcccacagaaaatttacttcaaatacggctgcctgcgtttcgcgctgaaagaactgaaagacatgaacaaaaagcgtgcgttcattgttaccgacaaagacctgttcaaactgggttacgtgaacaaaatcaccaaagttctggatgaaattgacatcaagtactccatcttcactgatatcaaatccgacccaacgattgatagcgtgaaaaagggcgctaaagaaatgctgaactttgaaccggacaccatcatcagcatcggtggtggctctcctatggatgctgcgaaggtcatgcacctgctgtacgaatacccggaagcggaaatcgaaaacctggctatcaacttcatggacatccgcaaacgtatctgcaacttcccgaagctgggcactaaagctatttccgttgccatcccgactaccgcgggcactggttccgaagccacgccgttcgccgtgatcaccaacgatgaaaccggtatgaaatacccgctgacctcttacgaactgaccccgaacatggcaattatcgacaccgagctgatgctgaacatgccgcgcaagctgaccgctgctaccggcatcgacgctctggtacatgctattgaggcgtacgtttccgtgatggctaccgattacaccgacgaactggccctgcgtgcgatcaaaatgattttcaagtacctgcctcgcgcttacaaaaacggcacgaatgacatcgaggcgcgtgagaaaatggcccatgcaagcaacatcgcgggcatggccttcgccaacgcgttcctgggcgtgtgccactctatggctcacaaactgggtgctatgcaccacgtgccgcacggtatcgcgtgtgctgtcctgatcgaagaagtaattaagtacaacgctactgattgcccgactaaacagaccgccttcccacagtacaaatctcctaacgctaaacgtaagtacgctgagatcgccgaatacctgaacctgaagggtacgagcgacactgagaaagttactgcgctgatcgaagctatctctaaactgaaaattgacctgtccatcccgcagaacatcagcgccgcaggcatcaacaaaaaggacttttacaacacgctggacaaaatgagcgaactggcttttgacgaccagtgcaccactgcaaacccgcgttacccgctgatctctgagctgaaagacatttatatcaaatctttt

SEQ ID NO: 169 - DNA, 2573 bp, Artificial Sequence
  Synthetic Construct
atgaaagtgacgaaccaaaaagaactgaaacaaaaactgaatgaactgcgtgaggcccagaaaaagttcgctacgtatacccaggagcaagttgagaagatcttcaaacagtgtgccattgcggctgccaaagagcgtattaacttggccaaactggcggtggaagaaaccggcatcggtctggtcgaggacaagattatcaagaatcactttgccgcggagtatatctacaacaaatacaaaaacgaaaagacttgcggcatcattgatcatgatgacagcttgggtatcacgaaagtcgcagaaccaatcggtattgtcgcggcaattgtcccgaccactaatccgaccagcaccgcgatcttcaagagcttgatcagcctgaaaacccgcaacgcgattttcttcagcccgcacccgcgtgcgaagaagagcaccatcgcagcggcgaagctgattttggatgccgcggttaaggccggtgcaccgaaaaacattattggctggattgacgagccgagcattgagctgtctcaggacctgatgagcgaaccggacattattctggccaccggtggtccgtctatggttaaggcagcgtactccagcggtaagcctgctatcggcgttggtgcgggcaatacgccggctatcatcgatgaaagcgcggatattgatatggcagttagctccatcattctgtccaaaacctacgacaatggtgttatctgtgcaagcgagcaaagcatcctggtgatgaatagcatttacgagaaggtcaaagaagagtttgttaagcgtggttcctatattctgaaccagaacgagattgcaaaaatcaaagaaacgatgtttaagaatggcgcgattaatgcagatattgttggtaagtccgcatacattatcgcgaagatggcgggtatcgaagtgccgcaaaccaccaaaatcttgatcggcgaagtgcagagcgtggagaagagcgaactgttcagcaaagagaaactgagcccggttctggctatgtacaaagtgaaggactttgacgaagccctgaagaaagctcagcgtctgattgagctgggcggcagcggtcacacgagcagcctgtatatcgatagccaaaacaataaggacaaggtgaaagagttcggtctggcgatgaaaacctctcgcacgtttatcaacatgccgagcagccaaggtgcgagcggcgatctgtataacttcgcaatcgcgccttcttttacgctgggttgcggtacctggggcggtaattcggtgagccagaatgtcgagccgaagcacctgctgaacatcaaatcggtcgcggagcgccgtgagaagagacctggttcaaagtcccacagaaaatttacttcaaatacggctgcctgcgtttcgcgctgaaagaactgaaagacatgaacaaaaagcgtgcgttcattgttaccgacaaagacctgttcaaactgggttacgtgaacaaaatcaccaaagttctggatgaaattgacatcaagtactccatcttcactgatatcaaatccgacccaacgattgatagcgtgaaaaagggcgctaaagaaatgctgaactttgaaccggacaccatcatcagcatcggtggtggctctcctatggatgctgcgaaggtcatgcacctgctgtacgaatacccggaagcggaaatcgaaaacctggctatcaacttcatggacatccgcaaacgtatctgcaacttcccgaagctgggcactaaagctatttccgttgccatcccgactaccgcgggcactggttccgaagccacgccgttcgccgtgatcaccaacgatgaaaccggtatgaaatacccgctgacctcttacgaactgaccccgaacatggcaattatcgacaccgagctgatgctgaacatgccgcgcaagctgaccgctgctaccggcatcgacgctctggtacatgctattgaggcgtacgtttccgtgatggctaccgattacaccgacgaactggccctgcgtgcgatcaaaatgattttcaagtacctgcctcgcgcttacaaaaacggcacgaatgacatcgaggcgcgtgagaaaatggcccatgcaagcaacatcgcgggcatggccttcgccaacgcgttcctgggcgtgtgccactctatggctcacaaactgggtgctatgcaccacgtgccgcacggtatcgcgtgtgctgtcctgatcgaagaagtaattaagtacaacgctactgattgcccgactaaacagaccgccttcccacagtacaaatctcctaacgctaaacgtaagtacgctgagatcgccgaatacctgaacctgaagggtacgagcgacactgagaaagttactgcgctgatcgaagctatctctaaactgaaaattgacctgtccatcccgcagaacatcagcgccgcaggcatcaacaaaaaggacttttacaacacgctggacaaaatgagcgaactggcttttgacgaccagtgcaccactgcaaacccgcgttacccgctgatctctgagctgaaagacatttatatcaaatctttt

SEQ ID NO: 170 - DNA, 2573 bp, Artificial Sequence
  Synthetic Construct
atgaaagtgacgaaccaaaaagaactgaaacaaaaactgaatgaactgcgtgaggcccagaaaaagttcgctacgtatacccaggagcaagttgacaagatcttcaaacagtgtgccattgcggctgccaaactgcgtattaacttggccaaactggcggtggaagaaaccggcatcggtctggtcgaggacaagattatcaagaatcactttgccgcggagtatatctacaacaaatacaaaaacgaaaagacttgcggcatcattgatcatgatgacagcttgggtatcacgaaagtcgcagaaccaatcggtattgtcgcggcaattgtcccgaccactaatccgaccagcaccgcgatcttcaagagcttgatcagcctgaaaacccgcaacgcgattttcttcagcccgcacccgcgtgcgaagaagagcaccatcgcagcggcgaagctgattttggatgccgcggttaaggccggtgcaccgaaaaacattattggctggattgacgagccgagcattgagctgtctcaggacctgatgagcgaagcggacattattctggccaccggtggtccgtctatggttaaggcagcgtactccagcggtaagcctgctatcggcgttggtgcgggcaatacgccggctatcatcgatgaaagcgcggatattgatatggcagttagctccatcattctgtccaaaacctacgacaatggtgttatctgtgcaagcgagcaaagcatcctggtgatgaatagcatttacgagaaggtcaaagaagagtttgttaagcgtggttcctatattctgaaccagaacgagattgcaaaaatcaaagaaacgatgtttaagaatggcgcgattaatgcagatattgttggtaagtccgcatacattatcgcgaagatggcgggtatcgaagtgccgcaaaccaccaaaatcttgatcggcgaagtgcagagcgtggagaagagcgaactgttcagcgaggagctgctgagcccggttctggctatgtacaaagtgaaggactttgacgaagccctgaagaaagctcagcgtctgattgagctgggcggcagcggtcacacgagcagcctgtatatcgatagccaaaacaataaggacaaggtgaaagagttcggtctggcgatgaaaacctctcgcacgtttatcaacatgccgagcagccaaggtgcgagcggcgatctgtataacttcgcaatcgcgccttcttttacgctgggttgcggtacctggggcggtaattcggtgagccagaatgtcgagccgaagcacctgctgaacatcaaatcggtcgcggagcgccgtgagaagagacctggttcaaagtcccacagaaaatttacttcaaatacggctgcctgcgtttcgcgctgaaagaactgaaagacatgaacaaaaagcgtgcgttcattgttaccgacaaagacctgttcaaactgggttacgtgaacaaaatcaccaaagttctggatgaaattgacatcaagtactccatcttcactgatatcaaatccgacccaacgattgatagcgtgaaaaagggcgctaaagaaatgctgaactttgaaccggacaccatcatcagcatcggtggtggctctcctatggatgctgcgaaggtcatgcacctgctgtacgaatacccggaagcggaaatcgaaaacctggctatcaacttcatggacatccgcaaacgtatctgcaacttcccgaagctgggcactaaagctatttccgttgccatcccgactaccgcgggcactggttccgaagccacgccgttcgccgtgatcaccaacgatgaaaccggtatgaaatacccgctgacctcttacgaactgaccccgaacatggcaattatcgacaccgagctgatgctgaacatgccgcgcaagctgaccgctgctaccggcatcgacgctctggtacatgctattgaggcgtacgtttccgtgatggctaccgattacaccgacgaactggccctgcgtgcgatcaaaatgattttcaagtacctgcctcgcgcttacaaaaacggcacgaatgacatcgaggcgcgtgagaaaatggcccatgcaagcaacatcgcgggcatggccttcgccaacgcgttcctgggcgtgtgccactctatggctcacaaactgggtgctatgcaccacgtgccgcacggtatcgcgtgtgctgtcctgatcgaagaagtaattaagtacaacgctactgattgcccgactaaacagaccgccttcccacagtacaaatctcctaacgctaaacgtaagtacgctgagatcgccgaatacctgaacctgaagggtacgagcgacactgagaaagttactgcgctgatcgaagctatctctaaactgaaaattgacctgtccatcccgcagaacatcagcgccgcaggcatcaacaaaaaggacttttacaacacgctggacaaaatgagcgaactggcttttgacgaccagtgcaccactgcaaacccgcgttacccgctgatctctgagctgaaagacatttatatcaaatctttt

SEQ ID NO: 171 - DNA, 2573 bp, Artificial Sequence
  Synthetic Construct
atgaaagtgacgaaccaaaaagaactgaaacaaaaactgaatgaactgcgtgaggcccagaaaaagttcgctacgtatacccaggagcaagttgacaagatcttcaaacagtgtgccattgcggctgccaaagagcgtattaacttggccaaactggcggtggaagaaaccggcatcggtctggtcgaggacaagattatcaagaatcactttgccgcggagtatatctacaacaaatacaaaaaccacaagacttgcggcatcattgatcatgatgacagcttgggtatcacgaaagtcgcagaaccaatcggtattgtcgcggcaattgtcccgaccactaatccgaccagcaccgcgatcttcaagagcttgatcagcctggcgacccgcaacgcgattttcttcagcccgcacccgcgtgcgaagaagagcaccatcgcagcggcgaagctgattttggatgccgcggttaaggccggtgcaccgaaaaacattattggctggattgacgagccgagcattgagctgtctcaggacctgatgagcgaagcggacattattctggccaccggtggtccgtctatggttaaggcagcgtactccagcggtaagcctgctatcggcgttggtgcgggcaatacgccggctatcatcgatgaaagcgcggatattgatatggcagttagctccatcattctgtccaaaacctacgacaatggtgttatctgtgcaagcgagcaaagcatcctggtgatgaatagcatttacgagaaggtcaaagaagagtttgttaagcgtggttcctatattctgaaccagaacgagattgcaaaaatcaaagaaacgatgtttaagaatggcgcgattaatgcagatattgttggtaagtccgcatacattatcgcgaagatggcgggtatcgaagtgccgcaaaccaccaaaatcttgatcggcgaagtgcagagcgtggagaagagcgaactgttcagccatgagaaactgagcccggttctggctatgtacaaagtgaaggactttgacgaagccctggacaaagctcagcgtctgattgagctgggcggcagcggtcacacgagcagcctgtatatcgatagccaaaacaataaggacaaggtgaaagagttcggtctggcgatgaaaacctctcgcacgtttatcaacatgccgagcagccaaggtgcgagcggcgatctgtataacttcgcaatcgcgccttcttttacgctgggttgcggtacctggggcggtaattcggtgagccagaatgtcgagccgaagcacctgctgaacatcaaatcggtcgcggagcgccgtgagaagagacctggttcaaagtcccacagaaaatttacttcaaatacggctgcctgcgtttcgcgctgaaagaactgaaagacatgaacaaaaagcgtgcgttcattgttaccgacaaagacctgttcaaactgggttacgtgaacaaaatcaccaaagttctggatgaaattgacatcaagtactccatcttcactgatatcaaatccgacccaacgattgatagcgtgaaaaagggcgctaaagaaatgctgaactttgaaccggacaccatcatcagcatcggtggtggctctcctatggatgctgcgaaggtcatgcacctgctgtacgaatacccggaagcggaaatcgaaaacctggctatcaacttcatggacatccgcaaacgtatctgcaacttcccgaagctgggcactaaagctatttccgttgccatcccgactaccgcgggcactggttccgaagccacgccgttcgccgtgatcaccaacgatgaaaccggtatgaaatacccgctgacctcttacgaactgaccccgaacatggcaattatcgacaccgagctgatgctgaacatgccgcgcaagctgaccgctgctaccggcatcgacgctctggtacatgctattgaggcgtacgtttccgtgatggctaccgattacaccgacgaactggccctgcgtgcgatcaaaatgattttcaagtacctgcctcgcgcttacaaaaacggcacgaatgacatcgaggcgcgtgagaaaatggcccatgcaagcaacatcgcgggcatggccttcgccaacgcgttcctgggcgtgtgccactctatggctcacaaactgggtgctatgcaccacgtgccgcacggtatcgcgtgtgctgtcctgatcgaagaagtaattaagtacaacgctactgattgcccgactaaacagaccgccttcccacagtacaaatctcctaacgctaaacgtaagtacgctgagatcgccgaatacctgaacctgaagggtacgagcgacactgagaaagttactgcgctgatcgaagctatctctaaactgaaaattgacctgtccatcccgcagaacatcagcgccgcaggcatcaacaaaaaggacttttacaacacgctggacaaaatgagcgaactggcttttgacgaccagtgcaccactgcaaacccgcgttacccgctgatctctgagctgaaagacatttatatcaaatctttt

SEQ ID NO: 172 - DNA, 2573 bp, Artificial Sequence
  Synthetic Construct
atgaaagtgacgaaccaaaaagaactgaaacaaaaactgaatgaactgcgtgaggcccagaaaaagttcgctacgtatacccaggagcaagttgacaagatcttcaaacagtgtgccattgcggctgccaaagagcgtattaacttggccaaactggcggtggaagaaaccggcatcggtctggtcgaggacaagattatcaagaatcactttgccgcggagtatatctacaacaaagagaaaaacgaaaagacttgcggcatcattgatcatgatgacagcttgggtatcacgaaagtcgcagaaccaatcggtattgtcgcggcaattgtcccgaccactaatccgaccagcaccgcgatcttcaagagcttgatcagcctgaaaacccgcaacgcgattttcttcagcccgcacccgcgtgcgaagaagagcaccatcgcagcggcgaagctgattttggatgccgcggttaaggccggtgcaccgaaaaacattattggctggattgacgagccgagcattgagctgtctcaggacctgatgagcgaagcggacattattctggccaccggtggtccgtctatggttaaggcagcgtactccagcggtaagcctgctatcggcgttggtgcgggcaatacgccggctatcatcgatgaaagcgcggatattgatatggcagttagctccatcattctgtccaaaacctacgacaatggtgttatctgtgcaagcgagcaaagcatcctggtgatgaatagcatttacgagaaggtcaaagaagagtttgttaagcgtggttcctatattctgaaccagaacgagattgcaaaaatcaaagaaacgatgtttaagaatggcgcgattaatgcagatattgttggtaagtccgcatacattatcgcgaagatggcgggtatcgaagtgccgcaaaccaccaaaatcttgatcggcgaagtgcagagcgtggagaagagcgaactgttcagccatgagaaactgagcccggttctggctatgtacaaagtgaaggactttgacgaagccctgaagaaagctcagcgtctgattgagctgggcggcagcggtcacacgagcagcctgtatatcgatagccaaaacaataaggacaaggtgaaagagttcggtctggcgatgaaaacctctcgcacgtttatcaacatgccgagcagccaaggtgcgagcggcgatctgtataacttcgcaatcgcgccttcttttacgctgggttgcggtacctggggcggtaattcggtgagccagaatgtcgagccgaagcacctgctgaacatcgtttcggtcgcgcgtcgccgtgagaagagacctggttcaaagtcccacagaaaatttacttcaaatacggctgcctgcgtttcgcgctgaaagaactgaaagacatgaacaaaaagcgtgcgttcattgttaccgacaaagacctgttcaaactgggttacgtgaacaaaatcaccaaagttctggatgaaattgacatcaagtactccatcttcactgatatcaaatccgacccaacgattgatagcgtgaaaaagggcgctaaagaaatgctgaactttgaaccggacaccatcatcagcatcggtggtggctctcctatggatgctgcgaaggtcatgcacctgctgtacgaatacccggaagcggaaatcgaaaacctggctatcaacttcatggacatccgcaaacgtatctgcaacttcccgaagctgggcactaaagctatttccgttgccatcccgactaccgcgggcactggttccgaagccacgccgttcgccgtgatcaccaacgatgaaaccggtatgaaatacccgctgacctcttacgaactgaccccgaacatggcaattatcgacaccgagctgatgctgaacatgccgcgcaagctgaccgctgctaccggcatcgacgctctggtacatgctattgaggcgtacgtttccgtgatggctaccgattacaccgacgaactggccctgcgtgcgatcaaaatgattttcaagtacctgcctcgcgcttacaaaaacggcacgaatgacatcgaggcgcgtgagaaaatggcccatgcaagcaacatcgcgggcatggccttcgccaacgcgttcctgggcgtgtgccactctatggctcacaaactgggtgctatgcaccacgtgccgcacggtatcgcgtgtgctgtcctgatcgaagaagtaattaagtacaacgctactgattgcccgactaaacagaccgccttcccacagtacaaatctcctaacgctaaacgtaagtacgctgagatcgccgaatacctgaacctgaagggtacgagcgacactgagaaagttactgcgctgatcgaagctatctctaaactgaaaattgacctgtccatcccgcagaacatcagcgccgcaggcatcaacaaaaaggacttttacaacacgctggacaaaatgagcgaactggcttttgacgaccagtgcaccactgcaaacccgcgttacccgctgatctctgagctgaaagacatttatatcaaatctttt

SEQ ID NO: 173 - DNA, 2573 bp, Artificial Sequence
  Synthetic Construct
atgaaagtgacgaaccaaaaagaactgaaacaaaaactgaatgaactgcgtgaggcccagaaaaagttcgctacgtatacccaggagcaagttgacaagatcttcaaacagtgtgccattgcggctgccaaagagcgtattaacttggccaaactggcggtggaagaaaccggcatcggtctggtcgaggacaagattatcaagaatcactttgccgcggagtatatctacaacaaatacaaaaacgaaaagacttgcggcatcattgatcatgatgacagcttgggtatcacgaaagtcgcagaaccaatcggtattgtcgcggcaattgtcccgaccactaatccgaccagcaccgcgatcttcaagagcttgatcagcctgaaaacccgcaacgcgattttcttcagcccgcacccgcgtgcgaagaagagcaccatcgcagcggcgaagctgattttggatgccgcggttaaggccggtgcaccgaaaaacattattggctggattgacgagccgagcattgagctgtctcaggacctgatgagcgaagcggacattattctggccaccggtggtccgtctatggttaaggcagcgtactccagcggtaagcctgctatcggcgcgggtgcgggcaatacgccggctatcatcgatgaaagcgcggatattgatatggcagttagctccatcattctgtccaaaacctacgacaatggtgttatctgtgcaagcgagcaaagcatcctggtgatgaatagcatttacgagaaggtcaaagaagagtttgttaagcgtggttcctatattctgaaccagaacgagattgcaaaaatcaaagaaacgatgtttaagaatggcgcgattaatgcagatattgttggtaagtccgcatacattatcgcgaagatggcgggtatcgaagtgccgcaaaccaccaaaatcttgatcggcgaagtgcaggacgtggagaagagcgaactgttcagcgttgagaaactgagcccggttctggctatgtacaaagtgaaggactttgacgaagccctgaagaaagctcagcgtctgattgagctgggcggcagcggtcacacgagcagcctgtatatcgatagccaaaacaataaggacaaggtgaaagagttcggtctggcgatgaaaacctctcgcacgtttatcaacatgccgagcagccaaggtgcgagcggcgatctgtataacttcgcaatcgcgccttcttttacgctgggttgcggtacctggggcggtaattcggtgagccagaatgtcgagccgaagcacctgctgaacatcaaatcggtcgcggagcgccgtgagaagagacctggttcaaagtcccacagaaaatttacttcaaatacggctgcctgcgtttcgcgctgaaagaactgaaagacatgaacaaaaagcgtgcgttcattgttaccgacaaagacctgttcaaactgggttacgtgaacaaaatcaccaaagttctggatgaaattgacatcaagtactccatcttcactgatatcaaatccgacccaacgattgatagcgtgaaaaagggcgctaaagaaatgctgaactttgaaccggacaccatcatcagcatcggtggtggctctcctatggatgctgcgaaggtcatgcacctgctgtacgaatacccggaagcggaaatcgaaaacctggctatcaacttcatggacatccgcaaacgtatctgcaacttcccgaagctgggcactaaagctatttccgttgccatcccgactaccgcgggcactggttccgaagccacgccgttcgccgtgatcaccaacgatgaaaccggtatgaaatacccgctgacctcttacgaactgaccccgaacatggcaattatcgacaccgagctgatgctgaacatgccgcgcaagctgaccgctgctaccggcatcgacgctctggtacatgctattgaggcgtacgtttccgtgatggctaccgattacaccgacgaactggccctgcgtgcgatcaaaatgattttcaagtacctgcctcgcgcttacaaaaacggcacgaatgacatcgaggcgcgtgagaaaatggcccatgcaagcaacatcgcgggcatggccttcgccaacgcgttcctgggcgtgtgccactctatggctcacaaactgggtgctatgcaccacgtgccgcacggtatcgcgtgtgctgtcctgatcgaagaagtaattaagtacaacgctactgattgcccgactaaacagaccgccttcccacagtacaaatctcctaacgctaaacgtaagtacgctgagatcgccgaatacctgaacctgaagggtacgagcgacactgagaaagttactgcgctgatcgaagctatctctaaactgaaaattgacctgtccatcccgcagaacatcagcgccgcaggcatcaacaaaaaggacttttacaacacgctggacaaaatgagcgaactggcttttgacgaccagtgcaccactgcaaacccgcgttacccgctgatctctgagctgaaagacatttatatcaaatctttt

SEQ ID NO: 174 - DNA, 2573 bp, Artificial Sequence
  Synthetic Construct
atgaaagtgacgaaccaaaaagaactgaaacaaaaactgaatgaactgcgtgaggcccagaaaaagttcgctacgtatacccaggaccaagttgacaagatcttcaaacagtgtgccattgcggctgccaaagagcgtattaacttggccaaactggcggtggaagaaaccggcatcggtctggtcgaggacaagattatcaagaatcactttgccgcggagtatatctacaacaaatacaaaaacgaaaagacttgcggcatcattgatcatgatgacagcttgggtatcacgaaagtcgcagaaccaatcggtattgtcgcggcaattgtcccgaccactaatccgaccagcaccgcgatcttcaagagcttgatcagcctgaaaacccgcaacgcgattttcttcagcccgcacccgcgtgcgaagaagagcaccatcgcagcggcgaagctgattttggatgccgcggttaaggccggtgcaccgaaaaacattattggctggattgacgagccgagcattgagctgtctcaggacctgatgaaagaagcggacattattctggccaccggtggtccgtctatggttaaggcagcgtactccagcggtaagcctgctatcggcgttggtgcgggcaatacgccggctatcatcgatgaaagcgcggatattgatatggcagttagctccatcattctgtccaaaacctacgacaatggtgttatctgtgcaagcgagcaaagcatcctggtgatgaatagcatttacgagaaggtcaaaaaagagtttgttaagcgtggttcctatattctgaaccagaacgagattgcaaaaatcaaagaaacgatgtttaagaatggcgcgattaatgcagatattgttggtaagtccgcatacattatcgcgaagatggcgggtatcgaagtgccgcaaaccaccaaaatcttgatcggcgaagtgcagagcgtggagaagagcgaactgttcagccatgagaaactgagcccggttctggctatgtacaaagtgaaggactttgacgaagccctgaagaaagctcagcgtctgattgagctgggcggcagcggtcacacgagcagcctgtatatcgatagccaaaacaataaggacaaggtgaaagagttcggtctggcgatgaaaacctctcgcacgtttatcaacatgccgagcagccaaggtgcgagcggcgatctgtataacttcgcaatcgcgccttcttttacgctgggttgcggtacctggggcggtaattcggtgagccagaatgtcgagccgaagcacctgctgaacatcaaatcggtcgcggagcgccgtgagaagagacctggttcaaagtcccacagaaaatttacttcaaatacggctgcctgcgtttcgcgctgaaagaactgaaagacatgaacaaaaagcgtgcgttcattgttaccgacaaagacctgttcaaactgggttacgtgaacaaaatcaccaaagttctggatgaaattgacatcaagtactccatcttcactgatatcaaatccgacccaacgattgatagcgtgaaaaagggcgctaaagaaatgctgaactttgaaccggacaccatcatcagcatcggtggtggctctcctatggatgctgcgaaggtcatgcacctgctgtacgaatacccggaagcggaaatcgaaaacctggctatcaacttcatggacatccgcaaacgtatctgcaacttcccgaagctgggcactaaagctatttccgttgccatcccgactaccgcgggcactggttccgaagccacgccgttcgccgtgatcaccaacgatgaaaccggtatgaaatacccgctgacctcttacgaactgaccccgaacatggcaattatcgacaccgagctgatgctgaacatgccgcgcaagctgaccgctgctaccggcatcgacgctctggtacatgctattgaggcgtacgtttccgtgatggctaccgattacaccgacgaactggccctgcgtgcgatcaaaatgattttcaagtacctgcctcgcgcttacaaaaacggcacgaatgacatcgaggcgcgtgagaaaatggcccatgcaagcaacatcgcgggcatggccttcgccaacgcgttcctgggcgtgtgccactctatggctcacaaactgggtgctatgcaccacgtgccgcacggtatcgcgtgtgctgtcctgatcgaagaagtaattaagtacaacgctactgattgcccgactaaacagaccgccttcccacagtacaaatctcctaacgctaaacgtaagtacgctgagatcgccgaatacctgaacctgaagggtacgagcgacactgagaaagttactgcgctgatcgaagctatctctaaactgaaaattgacctgtccatcccgcagaacatcagcgccgcaggcatcaacaaaaaggacttttacaacacgctggacaaaatgagcgaactggcttttgacgaccagtgcaccactgcaaacccgcgttacccgctgatctctgagctgaaagacatttatatcaaatctttt

SEQ ID NO: 175 - DNA, 2573 bp, Artificial Sequence
  Synthetic Construct
atgaaagtgacgaaccaaaaagaactgaaacaaaaactgaatgaactgcgtgaggcccagaaaaagttcgctacgtatacccaggagcaagttgacaagttcttcaaacagtgtgccattgcggctgccaaagagcgtattaacttggcccgtctggcggtggaagaaaccggcatcggtctggtcgaggacaagattatcaagaatcactttgccgcggagtatatctacaacaaatacaaaaacgaaaagacttgcggcatcattgatcatgatgacagcttgggtatcacgaaagtcgcagaaccaatcggtattgtcgcggcaattgtcccgaccactaatccgaccagcaccgcgatcttcaagagcttgatcagcctgaaaacccgcaacgcgattttcttcagcccgcacccgcgtgcgaagaagagcaccatcgcagcggcgaagctgattttggatgccgcggttaaggccggtgcaccgaaaaacattattggctggattgacgagccgagcattgagctgtctcaggacctgatgagcgaagcggacattattctggccaccggtggtccgtctatggttaaggcagcgtactccagcggtaagcctgctatcggcgttggtgcgggcaatacgccggctatcatcgatgaaagcgcggatattgatatggcagttagctccatcattctgtccaaaacctacgacaatggtgttatctgtgcaagcgagcaaagcatcctggtgatgaatagcatttacgagaaggtcaaagaagagtttgttaagcgtggttcctatattctgaaccagaacgagattgcaaaaatcaaagaaacgatgtttaagaatggcgcgattaatgcagatattgttggtaagtccgcatacattatcgcgaagatggcgggtatcgaagtgccgcaaaccaccaaaatcttgatcggcgaagtgcagagcgtggaggcgagcgaactgttcagccatgagaaactgagcccggttctggctatgtacaaagtgaaggactttgacgaagccctgaagaaagctcagcgtctgattgagctgggcggcagcggtcacacgagcagcctgtatatcgatagccaaaacaataaggacaaggtgaaagagttcggtctggcgatgaaaacctctcgcacgtttatcaacatgccgagcagccaaggtgcgagcggcgatctgtataacttcgcaatcgcgccttcttttacgctgggttgcggtacctggggcggtaattcggtgagccagaatgtcgagccgaagcacctgctgaacatcaaatcggtcgcggagcgccgtgagaagagacctggttcaaagtcccacagaaaatttacttcaaatacggctgcctgcgtttcgcgctgaaagaactgaaagacatgaacaaaaagcgtgcgttcattgttaccgacaaagacctgttcaaactgggttacgtgaacaaaatcaccaaagttctggatgaaattgacatcaagtactccatcttcactgatatcaaatccgacccaacgattgatagcgtgaaaaagggcgctaaagaaatgctgaactttgaaccggacaccatcatcagcatcggtggtggctctcctatggatgctgcgaaggtcatgcacctgctgtacgaatacccggaagcggaaatcgaaaacctggctatcaacttcatggacatccgcaaacgtatctgcaacttcccgaagctgggcactaaagctatttccgttgccatcccgactaccgcgggcactggttccgaagccacgccgttcgccgtgatcaccaacgatgaaaccggtatgaaatacccgctgacctcttacgaactgaccccgaacatggcaattatcgacaccgagctgatgctgaacatgccgcgcaagctgaccgctgctaccggcatcgacgctctggtacatgctattgaggcgtacgtttccgtgatggctaccgattacaccgacgaactggccctgcgtgcgatcaaaatgattttcaagtacctgcctcgcgcttacaaaaacggcacgaatgacatcgaggcgcgtgagaaaatggcccatgcaagcaacatcgcgggcatggccttcgccaacgcgttcctgggcgtgtgccactctatggctcacaaactgggtgctatgcaccacgtgccgcacggtatcgcgtgtgctgtcctgatcgaagaagtaattaagtacaacgctactgattgcccgactaaacagaccgccttcccacagtacaaatctcctaacgctaaacgtaagtacgctgagatcgccgaatacctgaacctgaagggtacgagcgacactgagaaagttactgcgctgatcgaagctatctctaaactgaaaattgacctgtccatcccgcagaacatcagcgccgcaggcatcaacaaaaaggacttttacaacacgctggacaaaatgagcgaactggcttttgacgaccagtgcaccactgcaaacccgcgttacccgctgatctctgagctgaaagacatttatatcaaatctttt

SEQ ID NO: 176 - DNA, 2573 bp, Artificial Sequence
  Synthetic Construct
atgaaagtgacgaaccaaaaagaactgaaacaaaaactgaatgaactgcgtgaggcccagaaaaagttcgctacgtgcacccaggagcaagttgacaagatcttcaaacagtgtgccattgcggctgccaaagagcgtattaacttggccaaactggcggtggaagaaaccggcatcggtctggtcgaggacaagattatcaagaatcactttgccgcggagtatatctacaacaaatacaaaaacgaaaagacttgcggcatcattgatcatgatgacagcttgggtatcacgaaagtcgcagaaccaatcggtattgtcgcggcaattgtcccgaccactaatccgaccagcaccgcgatcttcaagagcttgatcagcctgaaaacccgcaacgcgattttcttcagcccgcacccgcgtgcgaagaagagcaccatcgcagcggcgaagctgattttggatgccgcggttaaggccggtgcaccgaaaaacattattggctggattgacgagccgagcattgagctgtctcaggacctgatgagcgaagcggacattattctggccaccggtggtccgtctatggttaaggcagcgtactccagcggtaagcctgctatcggcgttggtgcgggcaatacgccggctatcatcgatgaaagcgcggatattgatatggcagttagctccatcattctgtccgcgacctacgacaatggtgttatctgtgcaagcgagcaaagcatcctggtgatgaatagcatttacgagaaggtcaaagaagagtttgttaagcgtggttcctatattctgaaccagaacgagattgcaaaaatcaaagaaacgatgtttaagaatggcgcgattaatcgtgatattgttggtaagtccgcatacattatcgcgaagatggcgggtatcgaagtgccgcaaaccaccaaaatcttgatcggcgaagtgcagagcgtggagaagagcgaactgttcagccatgagaaactgagcccggttctggctatgtacaaagtgaaggactttgacgaagccctgaagaaagctcagcgtctgattgagctgggcggcagcggtcacacgagcagcctgtatatcgatagccaaaacaataaggacaaggtgaaagagttcggtctggcgatgaaaacctctcgcacgtttatcaacatgccgagcagccaaggtgcgagcggcgatctgtataacttcgcaatcgcgccttcttttacgctgggttgcggtacctggggcggtaattcggtgagccagaatgtcgagccgaagcacctgctgaacatcaaatcggtcgcggagcgccgtgagaagagacctggttcaaagtcccacagaaaatttacttcaaatacggctgcctgcgtttcgcgctgaaagaactgaaagacatgaacaaaaagcgtgcgttcattgttaccgacaaagacctgttcaaactgggttacgtgaacaaaatcaccaaagttctggatgaaattgacatcaagtactccatcttcactgatatcaaatccgacccaacgattgatagcgtgaaaaagggcgctaaagaaatgctgaactttgaaccggacaccatcatcagcatcggtggtggctctcctatggatgctgcgaaggtcatgcacctgctgtacgaatacccggaagcggaaatcgaaaacctggctatcaacttcatggacatccgcaaacgtatctgcaacttcccgaagctgggcactaaagctatttccgttgccatcccgactaccgcgggcactggttccgaagccacgccgttcgccgtgatcaccaacgatgaaaccggtatgaaatacccgctgacctcttacgaactgaccccgaacatggcaattatcgacaccgagctgatgctgaacatgccgcgcaagctgaccgctgctaccggcatcgacgctctggtacatgctattgaggcgtacgtttccgtgatggctaccgattacaccgacgaactggccctgcgtgcgatcaaaatgattttcaagtacctgcctcgcgcttacaaaaacggcacgaatgacatcgaggcgcgtgagaaaatggcccatgcaagcaacatcgcgggcatggccttcgccaacgcgttcctgggcgtgtgccactctatggctcacaaactgggtgctatgcaccacgtgccgcacggtatcgcgtgtgctgtcctgatcgaagaagtaattaagtacaacgctactgattgcccgactaaacagaccgccttcccacagtacaaatctcctaacgctaaacgtaagtacgctgagatcgccgaatacctgaacctgaagggtacgagcgacactgagaaagttactgcgctgatcgaagctatctctaaactgaaaattgacctgtccatcccgcagaacatcagcgccgcaggcatcaacaaaaaggacttttacaacacgctggacaaaatgagcgaactggcttttgacgaccagtgcaccactgcaaacccgcgttacccgctgatctctgagctgaaagacatttatatcaaatctttt

SEQ ID NO: 177 - DNA, 2573 bp, Artificial Sequence
  Synthetic Construct
atgaaagtgacgaaccaaaaagaactgaaacaaaaactgaatgaactgcgtgaggcccagaaaaagttcaacacgtatacccaggagcaagttgacaagatcttcaaacagtgtgccattgcggctgccaaagagcgtattaacttggccaaactggcggtggaagaaaccggcatcggtctggtcgaggacaagattatcaagaatcactttgccgcggagtatatctacaacaaatacaaaaacgaaaagacttgcggcatcattgatcatgatgacagcttgggtatcacgaaagtcgcagaaccaatcggtattgtcgcggcaattgtcccgaccactaatccgaccagcaccgcgatcttcaagagcttgatcagcctgaaaacccgcaacgcgattttcttcagcccgcacccgcgtgcgaagaagagcaccatcgcagcggcgaagctgattttggatgccgcggttaaggccggtgcaccgaaaaacattattggctggattgacgagccgagcattgagctgtctcaggacctgatgagcgaagcggacattattctggccaccggtggtccgtctatggttaaggcagcgtactccagcggtaagcctgctatcggcgttggtgcgggcaatacgccggctatcatcgatgaaagcgcggatattgatatggcagttagctccatcattctgtccgcgacctacgacaatggtgttatctgtgcaagcgagcaaagcatcctggtgatgaatagcatttacgagaaggtcaaagaagagtttgttaagcgtggttcctatattctgaaccagaacgagattgcaaaaatcaaagaaacgatgtttaagaatggcgcgattaatgcagatattgttggtaagtccgcatacattatcgcgaagatggcgggtatcgaagtgccgcaaaccaccaaaatcttgatcggcgaagtgcagagcgtggagaagagcgaactgttcagccatgagaaactgagcccggttctggctatgtacaaagtgaaggactttgacgaagccctgaagaaagctgagcgtctgattgagctgggcggcagcggtcacacgagcagcctgtatatcgatagccaaaacaataaggacaaggtgaaagagttcggtctggcgatgaaaacctctcgcacgtttatcaacatgccgagcagccaaggtgcgagcggcgatctgtataacttcgcaatcgcgccttcttttacgctgggttgcggtacctggggcggtaattcggtgagccagaatgtcgagccgaagcacctgctgaacatcaaatcggtcgcggagcgccgtgagaagagacctggttcaaagtcccacagaaaatttacttcaaatacggctgcctgcgtttcgcgctgaaagaactgaaagacatgaacaaaaagcgtgcgttcattgttaccgacaaagacctgttcaaactgggttacgtgaacaaaatcaccaaagttctggatgaaattgacatcaagtactccatcttcactgatatcaaatccgacccaacgattgatagcgtgaaaaagggcgctaaagaaatgctgaactttgaaccggacaccatcatcagcatcggtggtggctctcctatggatgctgcgaaggtcatgcacctgctgtacgaatacccggaagcggaaatcgaaaacctggctatcaacttcatggacatccgcaaacgtatctgcaacttcccgaagctgggcactaaagctatttccgttgccatcccgactaccgcgggcactggttccgaagccacgccgttcgccgtgatcaccaacgatgaaaccggtatgaaatacccgctgacctcttacgaactgaccccgaacatggcaattatcgacaccgagctgatgctgaacatgccgcgcaagctgaccgctgctaccggcatcgacgctctggtacatgctattgaggcgtacgtttccgtgatggctaccgattacaccgacgaactggccctgcgtgcgatcaaaatgattttcaagtacctgcctcgcgcttacaaaaacggcacgaatgacatcgaggcgcgtgagaaaatggcccatgcaagcaacatcgcgggcatggccttcgccaacgcgttcctgggcgtgtgccactctatggctcacaaactgggtgctatgcaccacgtgccgcacggtatcgcgtgtgctgtcctgatcgaagaagtaattaagtacaacgctactgattgcccgactaaacagaccgccttcccacagtacaaatctcctaacgctaaacgtaagtacgctgagatcgccgaatacctgaacctgaagggtacgagcgacactgagaaagttactgcgctgatcgaagctatctctaaactgaaaattgacctgtccatcccgcagaacatcagcgccgcaggcatcaacaaaaaggacttttacaacacgctggacaaaatgagcgaactggcttttgacgaccagtgcaccactgcaaacccgcgttacccgctgatctctgagctgaaagacatttatatcaaatctttt

SEQ ID NO: 178 - DNA, 2573 bp, Artificial Sequence
  Synthetic Construct
atgaaagtgacgaaccaaaaagaactgaaacaaaaactgaatgaactgcgtgaggcccagaaaaagttcgctacgtatacccaggagcaagttgacaagatcttcaaacagtgtgccattgcggctgccaaactgcgtattaacttggccaaactggcggtggaagaaaccggcatcggtctggtcgaggacaagattatcaagaatcactttgccgcggagtatatctacaacaaatacaaaaacgaaaagacttgcggcatcattgatcatgatgacagcttgggtatcacgaaagtcgcagaaccaatcggtattgtcgcggcaattgtcccgaccactaatccgaccagcaccgcgatcttcaagagcttgatcagcctgaaaacccgcaacgcgattttcttcagcccgcacccgcgtgcgaagaagagcaccatcgcagcggcgaccctgattttggatgccgcggttaaggccggtgcaccgaaaaacattattggctggattgacgagccgagcattgagctgtctcaggacctgatgagcgaagcggacattattctggccaccggtggtccgtctatggttaaggcagcgtactccagcggtaagcctgctatcggcgttggtgcgggcaatacgccggctatcatcgatgaaagcgcggatattgatatggcagttagctccatcattctgtccaaaacctacgacaatggtgttatctgtgcaagcgagcaaagcatcctggtgatgaatagcatttacgagaaggtcaaagaagagtttgttaagcgtggttcctatattctgaaccagaacgagattgcaaaaatcaaagaaacgatgtttaagaatggcgcgattaatgcagatattgttggtaagtccgcatacattatcgcgaagatggcgggtatcgaagtgccgcaaaccaccaaaatcttgatcggcgaagtgcagagcgtggagaagagcgaactgttcagccatgagaaactgagcccggttctggctatgtacaaagtgaaggactttgacgaagccctgaagctggctcagcgtctgattgagctgggcggcagcggtcacacgagcagcctgtatatcgatagccaaaacaataaggacaaggtgaaagagttcggtctggcgatgaaaacctctcgcacgtttatcaacatgccgagcagccaaggtgcgagcggcgatctgtataacttcgcaatcgcgccttcttttacgctgggttgcggtacctggggcggtaattcggtgagccagaatgtcgagccgaagcacctgctgaacatcaaatcggtcgcggagcgccgtgagaagagacctggttcaaagtcccacagaaaatttacttcaaatacggctgcctgcgtttcgcgctgaaagaactgaaagacatgaacaaaaagcgtgcgttcattgttaccgacaaagacctgttcaaactgggttacgtgaacaaaatcaccaaagttctggatgaaattgacatcaagtactccatcttcactgatatcaaatccgacccaacgattgatagcgtgaaaaagggcgctaaagaaatgctgaactttgaaccggacaccatcatcagcatcggtggtggctctcctatggatgctgcgaaggtcatgcacctgctgtacgaatacccggaagcggaaatcgaaaacctggctatcaacttcatggacatccgcaaacgtatctgcaacttcccgaagctgggcactaaagctatttccgttgccatcccgactaccgcgggcactggttccgaagccacgccgttcgccgtgatcaccaacgatgaaaccggtatgaaatacccgctgacctcttacgaactgaccccgaacatggcaattatcgacaccgagctgatgctgaacatgccgcgcaagctgaccgctgctaccggcatcgacgctctggtacatgctattgaggcgtacgtttccgtgatggctaccgattacaccgacgaactggccctgcgtgcgatcaaaatgattttcaagtacctgcctcgcgcttacaaaaacggcacgaatgacatcgaggcgcgtgagaaaatggcccatgcaagcaacatcgcgggcatggccttcgccaacgcgttcctgggcgtgtgccactctatggctcacaaactgggtgctatgcaccacgtgccgcacggtatcgcgtgtgctgtcctgatcgaagaagtaattaagtacaacgctactgattgcccgactaaacagaccgccttcccacagtacaaatctcctaacgctaaacgtaagtacgctgagatcgccgaatacctgaacctgaagggtacgagcgacactgagaaagttactgcgctgatcgaagctatctctaaactgaaaattgacctgtccatcccgcagaacatcagcgccgcaggcatcaacaaaaaggacttttacaacacgctggacaaaatgagcgaactggcttttgacgaccagtgcaccactgcaaacccgcgttacccgctgatctctgagctgaaagacatttatatcaaatctttt

SEQ ID NO: 179 - DNA, 2573 bp, Artificial Sequence
  Synthetic Construct
atgaaagtgacgaaccaaaaagaactgaaacaaaaactgaatgaactgcgtgaggcccagaaaaagttcctgacgatgacccaggagcaagttgacaagatcttcaaacagtgtgccattgcggctgccaaagagcgtattaacttggccaaactggcggtggaagaaaccggcatcggtctggtcgaggacaagattatcaagaatcactttgccgcggagtatatctacaacaaatacaaaaacgaaaagacttgcggcatcattgatcatgatgacagcttgggtatcacgaaagtcgcagaaccaatcggtattgtcgcggcaattgtcccgaccactaatccgaccagcaccgcgatcttcaagagcttgatcagcctgaaaacccgcaacgcgattttcttcagcccgcacccgcgtgcgaagaagagcaccatcgcagcggcgaagctgattttggatgccgcggttaaggccggtgcaccgaaaaacattattggctggattgacgagccgagcattgagctgtctcaggacctgatgagcgaagcggacattattctggccaccggtggtccgtctatggttaaggcagcgtactccagcggtaagcctgctatcggcgttggtgcgggcaatacgccggctatcatcgatgaaagcgcggatattgatatggcagttagctccatcattctgtccaaaacctacgacaatggtgttatctgtgcaagcgagcaaagcatcctggtgatgaatagcatttacgagaaggtcaaagaagagtttgttaagcgtggttcctatattctgaaccagaacgagattgcaaaaatcaaagaaacgatgtttaagaatggcgcgattaatgcagatattgttggtaagtccgcatacattatcgcgaagatggcgggtatcgaagtgccgcaaaccaccaaaatcttgatcggcgaagtgcagagcgtggagaagagcgaactgttcagccatgagaaactgagcccggttctggctatgtacaaagtgaaggactttgacgaagccctgaagaaagctcagcgtctgattcacctgggcggcagcggtcacacgagcagcctgtatatcgatagccaaaacaataaggacaaggtgaaagagttcggtctggcgatgaaaacctctcgcacgtttatcaacatgccgagcagccaaggtgcgagcggcgatctgtataacttcgcaatcgcgccttcttttacgctgggttgcggtacctggggcggtaattcggtgagccagaatgtcgagccgaagcacctgctgaacatcaaatcggtcgcggagcgccgtgagaagagacctggttcaaagtcccacagaaaatttacttcaaatacggctgcctgcgtttcgcgctgaaagaactgaaagacatgaacaaaaagcgtgcgttcattgttaccgacaaagacctgttcaaactgggttacgtgaacaaaatcaccaaagttctggatgaaattgacatcaagtactccatcttcactgatatcaaatccgacccaacgattgatagcgtgaaaaagggcgctaaagaaatgctgaactttgaaccggacaccatcatcagcatcggtggtggctctcctatggatgctgcgaaggtcatgcacctgctgtacgaatacccggaagcggaaatcgaaaacctggctatcaacttcatggacatccgcaaacgtatctgcaacttcccgaagctgggcactaaagctatttccgttgccatcccgactaccgcgggcactggttccgaagccacgccgttcgccgtgatcaccaacgatgaaaccggtatgaaatacccgctgacctcttacgaactgaccccgaacatggcaattatcgacaccgagctgatgctgaacatgccgcgcaagctgaccgctgctaccggcatcgacgctctggtacatgctattgaggcgtacgtttccgtgatggctaccgattacaccgacgaactggccctgcgtgcgatcaaaatgattttcaagtacctgcctcgcgcttacaaaaacggcacgaatgacatcgaggcgcgtgagaaaatggcccatgcaagcaacatcgcgggcatggccttcgccaacgcgttcctgggcgtgtgccactctatggctcacaaactgggtgctatgcaccacgtgccgcacggtatcgcgtgtgctgtcctgatcgaagaagtaattaagtacaacgctactgattgcccgactaaacagaccgccttcccacagtacaaatctcctaacgctaaacgtaagtacgctgagatcgccgaatacctgaacctgaagggtacgagcgacactgagaaagttactgcgctgatcgaagctatctctaaactgaaaattgacctgtccatcccgcagaacatcagcgccgcaggcatcaacaaaaaggacttttacaacacgctggacaaaatgagcgaactggcttttgacgaccagtgcaccactgcaaacccgcgttacccgctgatctctgagctgaaagacatttatatcaaatctttt

SEQ ID NO: 180 - DNA, 2573 bp, Artificial Sequence
  Synthetic Construct
atgaaagtgacgaaccaaaaagaactgaaacaaaaactgaatgaactgcgtgaggcccagaaaaagttcgcttgctatacccaggagcaagttgagaagatcttcaaacagtgtgccattgcggctgccaaagagcgtattaacttggccaaactggcggtggaagaaaccggcatcggtctggtcgaggacaagattatcaagaatcactttgccgcggagtatatctacaacaaatacaaaaacgaaaagacttgcggcatcattgatcatgatgacagcttgggtatcacgaaagtcgcagaaccaatcggtattgtcgcggcaattgtcccgaccactaatccgaccagcaccgcgatcttcaagagcttgatcagcctgaaaacccgcaacgcgattttcttcagcccgcacccgcgtgcgaagaagagcaccatcgcagcggcgaagctgattttggatgccgcggttaaggccggtgcaccgaaaaacattattggctggattgacgagccgagcattgagctgtctcaggacctgatgagcgaagcggacattattctggccaccggtggtccgtctatggttaaggcagcgtactccagcggtaagcctgctatcggcgttggtgcgggcaatacgccggctatcatcgatgaaagcgcggatattgatatggcagttagctccatcattctgtccaaaacctacgacaatggtgttatctgtgcaagcgagcaaagcatcctggtgatgaatagcatttacgagaaggtcaaagaagagtttgttaagcgtggttcctatattctgaaccagaacgagattgcaaaaatcaaagaaacgatgtttaagaatggcgcgattaatgcagatattgttggtaagtccgcatacattatcgcgaagatggcgggtatcgaagtgccgcaaaccaccaaaatcttgatcggcgaagtgcagagcgtggagaagagcgaactgttcagccatgagaaactgagcccggttctggctatgtacaaagtgaaggactttgacgaagccctgaagaaagctcagcgtctgattgagctgggcggcagccaccacacgagcagcctgtatatcgatagccaaaacaataaggacaaggtgaaagagttcggtctggcgatgaaaacctctcgcacgtttatcaacatgccgagcagccaaggtgcgagcggcgatctgtataacttcgcaatcgcgccttcttttacgctgggttgcggtacctggggcggtaattcggtgagccagaatgtcgagccgaagcacctgctgaacatcaaatcggtcgcggagcgccgtgagaagagacctggttcaaagtcccacagaaaatttacttcaaatacggctgcctgcgtttcgcgctgaaagaactgaaagacatgaacaaaaagcgtgcgttcattgttaccgacaaagacctgttcaaactgggttacgtgaacaaaatcaccaaagttctggatgaaattgacatcaagtactccatcttcactgatatcaaatccgacccaacgattgatagcgtgaaaaagggcgctaaagaaatgctgaactttgaaccggacaccatcatcagcatcggtggtggctctcctatggatgctgcgaaggtcatgcacctgctgtacgaatacccggaagcggaaatcgaaaacctggctatcaacttcatggacatccgcaaacgtatctgcaacttcccgaagctgggcactaaagctatttccgttgccatcccgactaccgcgggcactggttccgaagccacgccgttcgccgtgatcaccaacgatgaaaccggtatgaaatacccgctgacctcttacgaactgaccccgaacatggcaattatcgacaccgagctgatgctgaacatgccgcgcaagctgaccgctgctaccggcatcgacgctctggtacatgctattgaggcgtacgtttccgtgatggctaccgattacaccgacgaactggccctgcgtgcgatcaaaatgattttcaagtacctgcctcgcgcttacaaaaacggcacgaatgacatcgaggcgcgtgagaaaatggcccatgcaagcaacatcgcgggcatggccttcgccaacgcgttcctgggcgtgtgccactctatggctcacaaactgggtgctatgcaccacgtgccgcacggtatcgcgtgtgctgtcctgatcgaagaagtaattaagtacaacgctactgattgcccgactaaacagaccgccttcccacagtacaaatctcctaacgctaaacgtaagtacgctgagatcgccgaatacctgaacctgaagggtacgagcgacactgagaaagttactgcgctgatcgaagctatctctaaactgaaaattgacctgtccatcccgcagaacatcagcgccgcaggcatcaacaaaaaggacttttacaacacgctggacaaaatgagcgaactggcttttgacgaccagtgcaccactgcaaacccgcgttacccgctgatctctgagctgaaagacatttatatcaaatctttt

SEQ ID NO: 181 - DNA, 2573 bp, Artificial Sequence
  Synthetic Construct
atgaaagtgacgaaccaaaaagaactgaaacaaaaactgaatgaactgcgtgaggcccagaaaaagttcgctacgtgcacccaggagcaagttgacaagatcttcaaacagtgtgccattgcggctgccaaagagcgtattaacttggccaaactggcggtggaagaaaccggcatcggtctggtcgaggacaagattatcaagaatcactttgccgcggagtatatctacaacaaatacaaaaacgaaaagacttgcggcatcattgatcatgatgacagcttgggtatcacgaaagtcgcagaaccaatcggtattgtcgcggcaattgtcccgaccactaatccgaccagcaccgcgatcttcaagagcttgatcagcctgaaaacccgcaacgcgattttcttcagcccgcacccgcgtgcgaagaagagcaccatcgcagcggcgaagctgattttggatgccgcggttaaggccggtgcaccgaaaaacattattggctggattgacgagccgagcattgagctgtctcaggacctgatgagcgaagcggacattattctggccaccggtggtccgtctatggttaaggcagcgtactccagcggtaagcctgctatcggcgttggtgcgggcaatacgccggctatcatcgatgaaagcgcggatattgatatggcagttagctccatcattctgtccaaaacctacgacaatggtgttatctgtgcaagcgagcaaagcatcctggtgatgaatagcatttacgagaaggtcaaagaagagtttgttaagcgtggttcctatattctgaaccagaacgagattgcaaaaatcaaagaaacgatgtttaagaatggcgcgattaatgcagatattgttggtaagtccgcatacattatcgcgaagatggcgggtatcgaagtgccgcaattcaccaaaatcttgatcggcgaagtgcagagcgtggagaagagcgaactgttcagccatgagaaactgagcccggttctggctatgtacaaagtgaaggactttgacgaagccctgaagaaagctcagcgtctgattgagctgggcggcagcggtcacacgagcagcctgtatatcgatagccaaaacaataaggacaaggtgaaagagttcggtctggcgatgaaaacctctcgcacgtttatcaacatgccgagcagccaaggtgcgagcggcgatctgtataacttcgcaatcgcgccttcttttacgctggcgtgcggtacctggggcggtaattcggtgagccagaatgtcgagccgaagcacctgctgaacatcaaatcggtcgcggagcgccgtgagaagagacctggttcaaagtcccacagaaaatttacttcaaatacggctgcctgcgtttcgcgctgaaagaactgaaagacatgaacaaaaagcgtgcgttcattgttaccgacaaagacctgttcaaactgggttacgtgaacaaaatcaccaaagttctggatgaaattgacatcaagtactccatcttcactgatatcaaatccgacccaacgattgatagcgtgaaaaagggcgctaaagaaatgctgaactttgaaccggacaccatcatcagcatcggtggtggctctcctatggatgctgcgaaggtcatgcacctgctgtacgaatacccggaagcggaaatcgaaaacctggctatcaacttcatggacatccgcaaacgtatctgcaacttcccgaagctgggcactaaagctatttccgttgccatcccgactaccgcgggcactggttccgaagccacgccgttcgccgtgatcaccaacgatgaaaccggtatgaaatacccgctgacctcttacgaactgaccccgaacatggcaattatcgacaccgagctgatgctgaacatgccgcgcaagctgaccgctgctaccggcatcgacgctctggtacatgctattgaggcgtacgtttccgtgatggctaccgattacaccgacgaactggccctgcgtgcgatcaaaatgattttcaagtacctgcctcgcgcttacaaaaacggcacgaatgacatcgaggcgcgtgagaaaatggcccatgcaagcaacatcgcgggcatggccttcgccaacgcgttcctgggcgtgtgccactctatggctcacaaactgggtgctatgcaccacgtgccgcacggtatcgcgtgtgctgtcctgatcgaagaagtaattaagtacaacgctactgattgcccgactaaacagaccgccttcccacagtacaaatctcctaacgctaaacgtaagtacgctgagatcgccgaatacctgaacctgaagggtacgagcgacactgagaaagttactgcgctgatcgaagctatctctaaactgaaaattgacctgtccatcccgcagaacatcagcgccgcaggcatcaacaaaaaggacttttacaacacgctggacaaaatgagcgaactggcttttgacgaccagtgcaccactgcaaacccgcgttacccgctgatctctgagctgaaagacatttatatcaaatctttt

SEQ ID NO: 182 - DNA, 2573 bp, Artificial Sequence
  Synthetic Construct
atgaaagtgacgaaccaaaaagaactgaaacaaaaactgaatgaactgcgtgaggcccagaaaaagttcgctacgtatacccaggagcaagttgacaagatcttcaaacagtgtgccattgcggctgccaaagagcgtattaacttggccaaactggcggtggaagaaaccggcatcggtctggtcgaggacaagattatcaagaatcactttgccgcggagtatatctacaacaaatacaaaaaccacaagacttgcggcatcattgatcatgatgacagcttgggtatcacgaaagtcgcagaaccaatcggtattgtcgcggcaattgtcccgaccactaatccgaccagcaccgcgatcttcaagagcttgatcagcctgaaaacccgcaacgcgattttcttcagcccgcacccgcgtgcgaagaagagcaccatcgcagcggcgaagctgattttggatgccgcggttaaggccggtgcaccgaaaaacattattggctggattgacgagccgagcattgagctgtctcaggacctgatgagcgaaccggacattattctggccaccggtggtccgtctatggttaaggcagcgtactccagcggtaagcctgctatcggcgttggtgcgggcaatacgccggctatcatcgatgaaagcgcggatattgatatggcagttagctccatcattctgtccaaaacctacgacaatggtgttatctgtgcaagcgagcaaagcatcctggtgatgaatagcatttacgagaaggtcaaagaagagtttgttaagcgtggttcctatattctgaaccagaacgagattgcaaaaatcaaagaaacgatgtttaagaatggcgcgattaatgcagatattgttggtaagtccgcatacattatcgcgaagatggcgggtatcgaagtgccgcaaaccaccaaaatcttgatcggcgaagtgcagagcgtggagaagagcgaactgttcagccatgagaaactgagcccggttctggctatgtacaaagtgaaggactttgacgaagccctgaagaaagctcagcgtctgattaacctgggcggcagcggtcacacgagcagcctgtatatcgatagccaaaacaataaggacaaggtgaaagagttcggtctggcgatgaaaacctctcgcacgtttatcaacatgccgagcagccaaggtgcgagcggcgatctgtataacttcgcaatcgcgccttcttttacgctgggttgcggtacctggggcggtaattcggtgagccagaatgtcgagccgaagcacctgctgaacatcaaatcggtcgcggagcgccgtgagaagagacctggttcaaagtcccacagaaaatttacttcaaatacggctgcctgcgtttcgcgctgaaagaactgaaagacatgaacaaaaagcgtgcgttcattgttaccgacaaagacctgttcaaactgggttacgtgaacaaaatcaccaaagttctggatgaaattgacatcaagtactccatcttcactgatatcaaatccgacccaacgattgatagcgtgaaaaagggcgctaaagaaatgctgaactttgaaccggacaccatcatcagcatcggtggtggctctcctatggatgctgcgaaggtcatgcacctgctgtacgaatacccggaagcggaaatcgaaaacctggctatcaacttcatggacatccgcaaacgtatctgcaacttcccgaagctgggcactaaagctatttccgttgccatcccgactaccgcgggcactggttccgaagccacgccgttcgccgtgatcaccaacgatgaaaccggtatgaaatacccgctgacctcttacgaactgaccccgaacatggcaattatcgacaccgagctgatgctgaacatgccgcgcaagctgaccgctgctaccggcatcgacgctctggtacatgctattgaggcgtacgtttccgtgatggctaccgattacaccgacgaactggccctgcgtgcgatcaaaatgattttcaagtacctgcctcgcgcttacaaaaacggcacgaatgacatcgaggcgcgtgagaaaatggcccatgcaagcaacatcgcgggcatggccttcgccaacgcgttcctgggcgtgtgccactctatggctcacaaactgggtgctatgcaccacgtgccgcacggtatcgcgtgtgctgtcctgatcgaagaagtaattaagtacaacgctactgattgcccgactaaacagaccgccttcccacagtacaaatctcctaacgctaaacgtaagtacgctgagatcgccgaatacctgaacctgaagggtacgagcgacactgagaaagttactgcgctgatcgaagctatctctaaactgaaaattgacctgtccatcccgcagaacatcagcgccgcaggcatcaacaaaaaggacttttacaacacgctggacaaaatgagcgaactggcttttgacgaccagtgcaccactgcaaacccgcgttacccgctgatctctgagctgaaagacatttatatcaaatctttt

SEQ ID NO: 183 - DNA, 2573 bp, Artificial Sequence
  Synthetic Construct
atgaaagtgacgaaccaaaaagaactgaaacaaaaactgaatgaactgcgtgaggcccagaaaaagttcgcttgctatacccaggagcaagttgacaagatcttcaaacagtgtgccattgcggctgccaaagagcgtattaacttggccaaactggcggtggaagaaaccggcatcggtctggtcgaggacaagattatcaagaatcactttgccgcggagtatatctacaacaaagagaaaaacgaaaagacttgcggcatcattgatcatgatgacagcttgggtatcacgaaagtcgcagaaccaatcggtattgtcgcggcaattgtcccgaccactaatccgaccagcaccgcgatcttcaagagcttgatcagcctgaaaacccgcaacgcgattttcttcagcccgcacccgcgtgcgaagaagagcaccatcgcagcggcgaagctgattttggatgccgcggttaaggccggtgcaccgaaaaacattattggctggattgacgagccgagcattgagctgtctcaggacatgatgagcgaagcggacattattctggccaccggtggtccgtctatggttaaggcagcgtactccagcggtaagcctgctatcggcgttggtgcgggcaatacgccggctatcatcgatgaaagcgcggatattgatatggcagttagctccatcattctgtccaaaacctacgacaatggtgttatctgtgcaagcgagcaaagcatcctggtgatgaatagcatttacgagaaggtcaaagaagagtttgttaagcgtggttcctatattctgaaccagaacgagattgcaaaaatcaaagaaacgatgtttaagaatggcgcgattaatgcagatattgttggtaagtccgcatacattatcgcgaagatggcgggtatcgaagtgccgcaaaccaccaaaatcttgatcggcgaagtgcagagcgtggagaagagcgaactgttcagccatgagaaactgagcccggttctggctatgtacaaagtgaaggactttgacgaagccctgaagaaagctcagcgtctgattgagctgggcggcagcggtcacacgagcagcctgtatatcgatagccaaaacaataaggacaaggtgaaagagttcggtctggcgatgaaaacctctcgcacgtttatcaacatgccgagcagccaaggtgcgagcggcgatctgtataacttcgcaatcgcgccttcttttacgctgggttgcggtacctggggcggtaattcggtgagccagaatgtcgagccgaagcacctgctgaacatcaaatcggtcgcggagcgccgtgagaagagacctggttcaaagtcccacagaaaatttacttcaaatacggctgcctgcgtttcgcgctgaaagaactgaaagacatgaacaaaaagcgtgcgttcattgttaccgacaaagacctgttcaaactgggttacgtgaacaaaatcaccaaagttctggatgaaattgacatcaagtactccatcttcactgatatcaaatccgacccaacgattgatagcgtgaaaaagggcgctaaagaaatgctgaactttgaaccggacaccatcatcagcatcggtggtggctctcctatggatgctgcgaaggtcatgcacctgctgtacgaatacccggaagcggaaatcgaaaacctggctatcaacttcatggacatccgcaaacgtatctgcaacttcccgaagctgggcactaaagctatttccgttgccatcccgactaccgcgggcactggttccgaagccacgccgttcgccgtgatcaccaacgatgaaaccggtatgaaatacccgctgacctcttacgaactgaccccgaacatggcaattatcgacaccgagctgatgctgaacatgccgcgcaagctgaccgctgctaccggcatcgacgctctggtacatgctattgaggcgtacgtttccgtgatggctaccgattacaccgacgaactggccctgcgtgcgatcaaaatgattttcaagtacctgcctcgcgcttacaaaaacggcacgaatgacatcgaggcgcgtgagaaaatggcccatgcaagcaacatcgcgggcatggccttcgccaacgcgttcctgggcgtgtgccactctatggctcacaaactgggtgctatgcaccacgtgccgcacggtatcgcgtgtgctgtcctgatcgaagaagtaattaagtacaacgctactgattgcccgactaaacagaccgccttcccacagtacaaatctcctaacgctaaacgtaagtacgctgagatcgccgaatacctgaacctgaagggtacgagcgacactgagaaagttactgcgctgatcgaagctatctctaaactgaaaattgacctgtccatcccgcagaacatcagcgccgcaggcatcaacaaaaaggacttttacaacacgctggacaaaatgagcgaactggcttttgacgaccagtgcaccactgcaaacccgcgttacccgctgatctctgagctgaaagacatttatatcaaatctttt

SEQ ID NO: 184 - DNA, 2573 bp, Artificial Sequence
  Synthetic Construct
atgaaagtgacgaaccaaaaagaactgaaacaaaaactgaatgaactgcgtgaggcccagaaaaagttcctgacgtatacccaggagcaagttgacaagatcttcaaacagtgtgccattgcggctgccaaagagcgtattaacttggcccgtctggcggtggaagaaaccggcatcggtctggtcgaggacaagattatcaagaatcactttgccgcggagtatatctacaacaaatacaaaaacgaaaagacttgcggcatcattgatcatgatgacagcttgggtatcacgaaagtcgcagaaccaatcggtattgtcgcggcaattgtcccgaccactaatccgaccagcaccgcgatcttcaagagcttgatcagcctgaaaacccgcaacgcgattttcttcagcccgcacccgcgtgcgaagaagagcaccatcgcagcggcgaagctgattttggatgccgcggttaaggccggtgcaccgaaaaacattattggctggattgacgagccgagcattgagctgtctcaggacctgatgagcgaagcggacattattctggccaccggtggtccgtctatggttaaggcagcgtactccagcggtaagcctgctatcggcgttggtgcgggcaatacgccggctatcatcgatgaaagcgcggatattgatatggcagttagctccatcattctgtccaaaacctacgacaatggtgttatctgtgcaagcgagcaaagcatcctggtgatgaatagcatttacgagaaggtcaaagaagagtttgttaagcgtggttcctatattctgaaccaggaggagattgcaaaaatcaaagaaacgatgtttaagaatggcgcgattaatgcagatattgttggtaagtccgcatacattatcgcgaagatggcgggtatcgaagtgccgcaaaccaccaaaatcttgatcggcgaagtgcagagcgtggagaagagcgaactgttcagccatgagaaactgagcccggttctggctatgtacaaagtgaaggactttgacgaagccctgaagaaagctcagcgtctgattgagctgggcggcagcggtcacacgagcagcctgtatatcgatagccaaaacaataaggacaaggtgaaagagttcggtctggcgatgaaaacctctcgcacgtttatcaacatgccgagcagccaaggtgcgagcggcgatctgtataacttcgcaatcgcgccttcttttacgctgggttgcggtacctggggcggtaattcggtgagccagaatgtcgagccgaagcacctgctgaacatcaaatcggtcgcggagcgccgtgagaagagacctggttcaaagtcccacagaaaatttacttcaaatacggctgcctgcgtttcgcgctgaaagaactgaaagacatgaacaaaaagcgtgcgttcattgttaccgacaaagacctgttcaaactgggttacgtgaacaaaatcaccaaagttctggatgaaattgacatcaagtactccatcttcactgatatcaaatccgacccaacgattgatagcgtgaaaaagggcgctaaagaaatgctgaactttgaaccggacaccatcatcagcatcggtggtggctctcctatggatgctgcgaaggtcatgcacctgctgtacgaatacccggaagcggaaatcgaaaacctggctatcaacttcatggacatccgcaaacgtatctgcaacttcccgaagctgggcactaaagctatttccgttgccatcccgactaccgcgggcactggttccgaagccacgccgttcgccgtgatcaccaacgatgaaaccggtatgaaatacccgctgacctcttacgaactgaccccgaacatggcaattatcgacaccgagctgatgctgaacatgccgcgcaagctgaccgctgctaccggcatcgacgctctggtacatgctattgaggcgtacgtttccgtgatggctaccgattacaccgacgaactggccctgcgtgcgatcaaaatgattttcaagtacctgcctcgcgcttacaaaaacggcacgaatgacatcgaggcgcgtgagaaaatggcccatgcaagcaacatcgcgggcatggccttcgccaacgcgttcctgggcgtgtgccactctatggctcacaaactgggtgctatgcaccacgtgccgcacggtatcgcgtgtgctgtcctgatcgaagaagtaattaagtacaacgctactgattgcccgactaaacagaccgccttcccacagtacaaatctcctaacgctaaacgtaagtacgctgagatcgccgaatacctgaacctgaagggtacgagcgacactgagaaagttactgcgctgatcgaagctatctctaaactgaaaattgacctgtccatcccgcagaacatcagcgccgcaggcatcaacaaaaaggacttttacaacacgctggacaaaatgagcgaactggcttttgacgaccagtgcaccactgcaaacccgcgttacccgctgatctctgagctgaaagacatttatatcaaatctttt

SEQ ID NO: 185 - DNA, 2573 bp, Artificial Sequence
  Synthetic Construct
atgaaagtgacgaaccaaaaagaactgaaacaaaaactgaatgaactgcgtgaggcccagaaaaagttcgctacgatgacccaggagcaagttgacaagatcttcaaacagtgtgccattgcggctgccaaagagcgtattaacttggccaaactggcggtggaagaaaccggcatcggtctggtcgaggacaagattatcaagaatcactttgccgcggagtatatctacaacaaatacaaaaacgaaaagacttgcggcatcattgatcatgatgacagcttgggtatcacgaaagtcgcagaaccaatcggtattgtcgcggcaattgtcccgaccactaatccgaccagcaccgcgatcttcaagagcttgatcagcctgaaaacccgcaacgcgattttcttcagcccgcacccgcgtgcgaagaagagcaccatcgcagcggcgaagctgattttggatgccgcggttaaggccggtgcaccgaaaaacattattggctggattgacgagccgagcattgagctgtctcaggacatgatgagcgaagcggacattattctggccaccggtggtccgtctatggttaaggcagcgtactccagcggtaagcctgctatcggcgttggtgcgggcaatacgccggctatcatcgatgaaagcgcggatattgatatggcagttagctccatcattctgtccaaaacctacgacaatggtgttatctgtgcaagcgagcaaagcatcctggtgatgaatagcatttacgagaaggtcaaagaagagtttgttaagcgtggttcctatattctgaaccagaacgagattgcaaaaatcaaagaaacgatgtttaagaatggcgcgattaatgcagatattgttggtaagtccgcatacattatcgcgaagatggcgggtatcgaagtgccgcaaaccaccaaaatcttgatcggcgaagtgcagagcgtggagaagagcgaactgttcagccatgagaaactgagcccggttctggctatgtacaaagtgaaggactttgacgaagccctgaagaaagctcagcgtctgattgagctgggcggcagcggtcacacgagcagcctgtatagcgatagccaaaacaataaggacaaggtgaaagagttcggtctggcgatgaaaacctctcgcacgtttatcaacatgccgagcagccaaggtgcgagcggcgatctgtataacttcgcaatcgcgccttcttttacgctgggttgcggtacctggggcggtaattcggtgagccagaatgtcgagccgaagcacctgctgaacatcaaatcggtcgcggagcgccgtgagaagagacctggttcaaagtcccacagaaaatttacttcaaatacggctgcctgcgtttcgcgctgaaagaactgaaagacatgaacaaaaagcgtgcgttcattgttaccgacaaagacctgttcaaactgggttacgtgaacaaaatcaccaaagttctggatgaaattgacatcaagtactccatcttcactgatatcaaatccgacccaacgattgatagcgtgaaaaagggcgctaaagaaatgctgaactttgaaccggacaccatcatcagcatcggtggtggctctcctatggatgctgcgaaggtcatgcacctgctgtacgaatacccggaagcggaaatcgaaaacctggctatcaacttcatggacatccgcaaacgtatctgcaacttcccgaagctgggcactaaagctatttccgttgccatcccgactaccgcgggcactggttccgaagccacgccgttcgccgtgatcaccaacgatgaaaccggtatgaaatacccgctgacctcttacgaactgaccccgaacatggcaattatcgacaccgagctgatgctgaacatgccgcgcaagctgaccgctgctaccggcatcgacgctctggtacatgctattgaggcgtacgtttccgtgatggctaccgattacaccgacgaactggccctgcgtgcgatcaaaatgattttcaagtacctgcctcgcgcttacaaaaacggcacgaatgacatcgaggcgcgtgagaaaatggcccatgcaagcaacatcgcgggcatggccttcgccaacgcgttcctgggcgtgtgccactctatggctcacaaactgggtgctatgcaccacgtgccgcacggtatcgcgtgtgctgtcctgatcgaagaagtaattaagtacaacgctactgattgcccgactaaacagaccgccttcccacagtacaaatctcctaacgctaaacgtaagtacgctgagatcgccgaatacctgaacctgaagggtacgagcgacactgagaaagttactgcgctgatcgaagctatctctaaactgaaaattgacctgtccatcccgcagaacatcagcgccgcaggcatcaacaaaaaggacttttacaacacgctggacaaaatgagcgaactggcttttgacgaccagtgcaccactgcaaacccgcgttacccgctgatctctgagctgaaagacatttatatcaaatctttt

SEQ ID NO: 186 - DNA, 2573 bp, Artificial Sequence
  Synthetic Construct
atgaaagtgacgaaccaaaaagaactgaaacaaaaactgaatgaactgcgtgaggcccagaaaaagttcgctacgtatacccaggagcaagttgacaagatcttcaaacagtgtgccattgcggctgccaaagagcgtattaacttggccaaactggcggtggaagaaaccggcatcggtctggtcgaggacaagattatcaagaatcactttgccgcggagtatatctacaacaaatacaaaaacgaaaagacttgcggcatcattgatcatgatgacagcttgggtatcacgaaagtcgcagaaccaatcggtattgtcgcgagcattgtcccgaccactaatccgaccagcaccgcgatcttcaagagcttgatcagcctgaaaacccgcaacgcgattttcttcagcccgcacccgcgtgcgaagaagagcaccatcgcagcggcgaagctgattttggatgccgcggttaaggccggtgcaccgaaaaacattattggctggattgacgagccgagcattgagctgtctcaggacctgatgagcgaagcggacattattctggccaccggtggtccgtctatggttaaggcagcgtactccagcggtaagcctgctatcggcgttggtgcgggcaatacgccggctatcatcgatgaaagcgcggatattgatatggcagttagctccatcattctgtccaaaacctacgacaatggtgttatctgtgcaagcgagcaaagcatcctggtgatgaatagcatttacgagaaggtcaaagaagagtttgttaagcgtggttcctatattctgaaccagaacgagattgcaaaaatcaaagaaacgatgtttaagaatggcgcgattaatgcagatattgttggtaagtccgcatacattatcgcgaagatggcgggtatcgaagtgccgcaattcaccaaaatcttgatcggcgaagtgcagagcgtggagaagagcgaactgttcagccatgagaaactgagcccggttctggctatgtacaaagtgaaggactttgacgaagccctgaagaaagctcagcgtctgattgagctgggcggcagcggtcacacgagcagcctgtatatcgatagccaaaacaataaggacaaggtgaaagagttcggtctgcgtatgaaaacctctcgcacgtttatcaacatgccgagcagccaaggtgcgagcggcgatctgtataacttcgcaatcgcgccttcttttacgctgggttgcggtacctggggcggtaattcggtgagccagaatgtcgagccgaagcacctgctgaacatcaaatcggtcgcggagcgccgtgagaagagacctggttcaaagtcccacagaaaatttacttcaaatacggctgcctgcgtttcgcgctgaaagaactgaaagacatgaacaaaaagcgtgcgttcattgttaccgacaaagacctgttcaaactgggttacgtgaacaaaatcaccaaagttctggatgaaattgacatcaagtactccatcttcactgatatcaaatccgacccaacgattgatagcgtgaaaaagggcgctaaagaaatgctgaactttgaaccggacaccatcatcagcatcggtggtggctctcctatggatgctgcgaaggtcatgcacctgctgtacgaatacccggaagcggaaatcgaaaacctggctatcaacttcatggacatccgcaaacgtatctgcaacttcccgaagctgggcactaaagctatttccgttgccatcccgactaccgcgggcactggttccgaagccacgccgttcgccgtgatcaccaacgatgaaaccggtatgaaatacccgctgacctcttacgaactgaccccgaacatggcaattatcgacaccgagctgatgctgaacatgccgcgcaagctgaccgctgctaccggcatcgacgctctggtacatgctattgaggcgtacgtttccgtgatggctaccgattacaccgacgaactggccctgcgtgcgatcaaaatgattttcaagtacctgcctcgcgcttacaaaaacggcacgaatgacatcgaggcgcgtgagaaaatggcccatgcaagcaacatcgcgggcatggccttcgccaacgcgttcctgggcgtgtgccactctatggctcacaaactgggtgctatgcaccacgtgccgcacggtatcgcgtgtgctgtcctgatcgaagaagtaattaagtacaacgctactgattgcccgactaaacagaccgccttcccacagtacaaatctcctaacgctaaacgtaagtacgctgagatcgccgaatacctgaacctgaagggtacgagcgacactgagaaagttactgcgctgatcgaagctatctctaaactgaaaattgacctgtccatcccgcagaacatcagcgccgcaggcatcaacaaaaaggacttttacaacacgctggacaaaatgagcgaactggcttttgacgaccagtgcaccactgcaaacccgcgttacccgctgatctctgagctgaaagacatttatatcaaatctttt

SEQ ID NO: 187 - DNA, 2573 bp, Artificial Sequence
  Synthetic Construct
atgaaagtgacgaaccaaaaagaactgaaacaaaaactgaatgaactgcgtgaggcccagaaaaagttcgctacgtatacccaggagcaagttgacaagatcttcaaacagtgtgccattgcggctgccaaagagcgtattaacttggccaaactggcggtggaagaaaccggcatcggtctggtcgaggacaagattatcaagaatcactttgccgcggagtatatctacaacaaatacaaaaacgaaaagacttgcggcatcattgatcatgatgacagcttgggtatcacgaaagtcgcagaaccaatcggtattgtcgcggcaattgtcccgaccactaatccgaccagcaccgcgatcttcaagagcttgatcagcctgaaaacccgcaacgcgattttcttcagcccgcacccgcgtgcgaagaagagcaccatcgcagcggcgaagctgattttggatgccgcggttaaggccggtgcaccgaaaaacattattggctggattgacgagccgagcattgagctgtctcaggacctgatgagcgaagcggacattattctggccaccggtggtccgtctatggttaaggcagcgtactccagcggtaagcctgctatcggcgttggtgcgggcaatacgccggctatcatcgatgaaagcgcggatattgatatggcagttagctccatcattctgtccaaaacctacgacaatggtgttatctgtgcaagcgagcaaagcatcctggtgatgaatagcatttacgagaaggtcaaagaagagtttgttaagcgtggttcctatattctgaaccagaacgagattgcaaaaatcaaagaaacgatgtttaagaatggcgcgattaatgcagatattgttggtaagtccgcatacattatcgcgaagatggcgggtatcgaagtgccgcaaaccaccaaaatcttgatcggcgaagtgcagagcgtggagaagagcgaactgttcagcgaggagaaactgagcccggttctggctatgtacaaagtgaaggactttgacgaagccctgaagaaagctcagcgtctgattgagctgggcggcagcggtcacacgagcagcctgtatatcgatagccaaaacaataaggacaaggtgaaagagttcggtctggcgatgaaaacctctatcacgtttatcaacatgccgagcagccaaggtgcgagcggcgatctgtataacttcgcaatcgcgccttcttttacgctgggttgcggtacctggggcggtaattcggtgagccagaatgtcgagccgaagcacctgctgaacatcgtttcggtcgcggagcgccgtgagaagagacctggttcaaagtcccacagaaaatttacttcaaatacggctgcctgcgtttcgcgctgaaagaactgaaagacatgaacaaaaagcgtgcgttcattgttaccgacaaagacctgttcaaactgggttacgtgaacaaaatcaccaaagttctggatgaaattgacatcaagtactccatcttcactgatatcaaatccgacccaacgattgatagcgtgaaaaagggcgctaaagaaatgctgaactttgaaccggacaccatcatcagcatcggtggtggctctcctatggatgctgcgaaggtcatgcacctgctgtacgaatacccggaagcggaaatcgaaaacctggctatcaacttcatggacatccgcaaacgtatctgcaacttcccgaagctgggcactaaagctatttccgttgccatcccgactaccgcgggcactggttccgaagccacgccgttcgccgtgatcaccaacgatgaaaccggtatgaaatacccgctgacctcttacgaactgaccccgaacatggcaattatcgacaccgagctgatgctgaacatgccgcgcaagctgaccgctgctaccggcatcgacgctctggtacatgctattgaggcgtacgtttccgtgatggctaccgattacaccgacgaactggccctgcgtgcgatcaaaatgattttcaagtacctgcctcgcgcttacaaaaacggcacgaatgacatcgaggcgcgtgagaaaatggcccatgcaagcaacatcgcgggcatggccttcgccaacgcgttcctgggcgtgtgccactctatggctcacaaactgggtgctatgcaccacgtgccgcacggtatcgcgtgtgctgtcctgatcgaagaagtaattaagtacaacgctactgattgcccgactaaacagaccgccttcccacagtacaaatctcctaacgctaaacgtaagtacgctgagatcgccgaatacctgaacctgaagggtacgagcgacactgagaaagttactgcgctgatcgaagctatctctaaactgaaaattgacctgtccatcccgcagaacatcagcgccgcaggcatcaacaaaaaggacttttacaacacgctggacaaaatgagcgaactggcttttgacgaccagtgcaccactgcaaacccgcgttacccgctgatctctgagctgaaagacatttatatcaaatctttt

SEQ ID NO: 188 - DNA, 2573 bp, Artificial Sequence
  Synthetic Construct
atgaaagtgacgaaccaaaaagaactgaaacaaaaactgaatgaactgcgtgaggcccagaaaaagttcgctacgtatacccaggagcaagttgacaagatcttcaaacagtgtgccattgcggctgccaaagagcgtattaacttggccaaactggcggtggaagaaaccggcatcggtctggtcgaggacaagattatcaagaatcactttgccgcggagtatatctacaacaaatacaaaaacgaaaagacttgcggcatcattgatcatgatgacagcttgggtatcacgaaagtcgcagaaccaatcggtattgtcgcggcaattgtcccgaccactaatccgaccagcaccgcgatcttcaagagcttgatcagcctgaaaacccgcaacgcgattttcttcagcccgcacccgcgtgcgaagaagagcaccatcgcagcggcgaagctgattttggatgccgcggttaaggccggtgcaccgaaaaacattattggctggattgacgagccgagcattgagctgtctcaggacctgatgaaagaagcggacattattctggccaccggtggtccgtctatggttaaggcagcgtactccagcggtaagaaagctatcggcgttggtgcgggcaatacgccggctatcatcgatgaaagcgcggatattgatatggcagttagctccatcattctgtccaaaacctacgacaatggtgttatctgtgcaagcgagcaaagcatcctggtgatgaatagcatttacgagaaggtcaaagaagagtttgttaagcgtggttcctatattctgaaccagaacgagattgcaaaaatcaaagaaacgatgtttaagaatggcgcgattaatgcagatattgttggtaagtccgcatacattatcgcgaagatggcgggtatcgaagtgccgcaaaccaccaaaatcttgatcggcgaagtgcagagcgtggagaagagcgaactgttcagccatgagaaactgagcccggttctggctatgtacaaagtgaaggactttgacgaagccctgaagaaagctcagcgtctgattgagctgggcggcagccaccacacgagcagcctgtatatcgatagccaaaacaataaggacaaggtgaaagagttcggtctggcgatgaaaacctctcgcacgtttatcaacatgccgagcagccaaggtgcgagcggcgatctgtataacttcgcaatcgcgccttcttttacgctgggttgcggtacctggggcggtaattcggtgagccagaatgtcgagccgaagcacctgctgaacatcaaatcggtcgcggagcgccgtgagaagagacctggttcaaagtcccacagaaaatttacttcaaatacggctgcctgcgtttcgcgctgaaagaactgaaagacatgaacaaaaagcgtgcgttcattgttaccgacaaagacctgttcaaactgggttacgtgaacaaaatcaccaaagttctggatgaaattgacatcaagtactccatcttcactgatatcaaatccgacccaacgattgatagcgtgaaaaagggcgctaaagaaatgctgaactttgaaccggacaccatcatcagcatcggtggtggctctcctatggatgctgcgaaggtcatgcacctgctgtacgaatacccggaagcggaaatcgaaaacctggctatcaacttcatggacatccgcaaacgtatctgcaacttcccgaagctgggcactaaagctatttccgttgccatcccgactaccgcgggcactggttccgaagccacgccgttcgccgtgatcaccaacgatgaaaccggtatgaaatacccgctgacctcttacgaactgaccccgaacatggcaattatcgacaccgagctgatgctgaacatgccgcgcaagctgaccgctgctaccggcatcgacgctctggtacatgctattgaggcgtacgtttccgtgatggctaccgattacaccgacgaactggccctgcgtgcgatcaaaatgattttcaagtacctgcctcgcgcttacaaaaacggcacgaatgacatcgaggcgcgtgagaaaatggcccatgcaagcaacatcgcgggcatggccttcgccaacgcgttcctgggcgtgtgccactctatggctcacaaactgggtgctatgcaccacgtgccgcacggtatcgcgtgtgctgtcctgatcgaagaagtaattaagtacaacgctactgattgcccgactaaacagaccgccttcccacagtacaaatctcctaacgctaaacgtaagtacgctgagatcgccgaatacctgaacctgaagggtacgagcgacactgagaaagttactgcgctgatcgaagctatctctaaactgaaaattgacctgtccatcccgcagaacatcagcgccgcaggcatcaacaaaaaggacttttacaacacgctggacaaaatgagcgaactggcttttgacgaccagtgcaccactgcaaacccgcgttacccgctgatctctgagctgaaagacatttatatcaaatctttt

SEQ ID NO: 189 - DNA, 2573 bp, Artificial Sequence
  Synthetic Construct
atgaaagtgacgaaccaaaaagaactgaaacaaaaactgaatgaactgcgtgaggcccagaaaaagttcgctacgtatacccaggagcaagttgacaagatcttcaaacagtgtgccattgcggctgccaaataccgtattaacttggccaaactggcggtggaagaaaccggcatcggtctggtcgaggacaagattatcaagaatcactttgccgcggagtatatctacaacaaatacaaaaaccacaagacttgcggcatcattgatcatgatgacagcttgggtatcacgaaagtcgcagaaccaatcggtattgtcgcggcaattgtcccgaccactaatccgaccagcaccgcgatcttcaagagcttgatcagcctgaaaacccgcaacgcgattttcttcagcccgcacccgcgtgcgaagaagagcaccatcgcagcggcgaagctgattttggatgccgcggttaaggccggtgcaccgaaaaacattattggctggattgacgagccgagcattgagctgtctcaggacctgatgaaagaagcggacattattctggccaccggtggtccgtctatggttaaggcagcgtactccagcggtaagcctgctatcggcgttggtgcgggcaatacgccggctatcatcgatgaaagcgcggatattgatatggcagttagctccatcattctgtccaaaacctacgacaatggtgttatctgtgcaagcgagcaaagcatcctggtgatgaatagcatttacgagaaggtcaaagaagagtttgttaagcgtggttcctatattctgaaccagaacgagattgcaaaaatcaaagaaacgatgtttaagaatggcgcgattaatgcagatattgttggtaagtccgcatacattatcgcgaagatggcgggtatcgaagtgccgcaaaccaccaaaatcttgatcggcgaagtgcagagcgtggagaagagcgaactgttcagccatgagaaactgagcccggttctggctatgtacaaagtgaaggactttgacgaagccctgaagaaagctcagcgtctgattgagctgggcggcagcggtcacacgagcagcctgtatatcgatagccaaaacaataaggacaaggtgaaagagttcggtctggcgatgaaaacctctcgcacgtttatcaacatgccgagcagccaaggtgcgagcggcgatctgtataacttcgcaatcgcgccttcttttacgctgggttgcggtacctggggcggtaattcggtgagccagaatgtcgagccgaagcacctgctgaacatcaaatcggtcgcggagcgccgtgagaagagacctggttcaaagtcccacagaaaatttacttcaaatacggctgcctgcgtttcgcgctgaaagaactgaaagacatgaacaaaaagcgtgcgttcattgttaccgacaaagacctgttcaaactgggttacgtgaacaaaatcaccaaagttctggatgaaattgacatcaagtactccatcttcactgatatcaaatccgacccaacgattgatagcgtgaaaaagggcgctaaagaaatgctgaactttgaaccggacaccatcatcagcatcggtggtggctctcctatggatgctgcgaaggtcatgcacctgctgtacgaatacccggaagcggaaatcgaaaacctggctatcaacttcatggacatccgcaaacgtatctgcaacttcccgaagctgggcactaaagctatttccgttgccatcccgactaccgcgggcactggttccgaagccacgccgttcgccgtgatcaccaacgatgaaaccggtatgaaatacccgctgacctcttacgaactgaccccgaacatggcaattatcgacaccgagctgatgctgaacatgccgcgcaagctgaccgctgctaccggcatcgacgctctggtacatgctattgaggcgtacgtttccgtgatggctaccgattacaccgacgaactggccctgcgtgcgatcaaaatgattttcaagtacctgcctcgcgcttacaaaaacggcacgaatgacatcgaggcgcgtgagaaaatggcccatgcaagcaacatcgcgggcatggccttcgccaacgcgttcctgggcgtgtgccactctatggctcacaaactgggtgctatgcaccacgtgccgcacggtatcgcgtgtgctgtcctgatcgaagaagtaattaagtacaacgctactgattgcccgactaaacagaccgccttcccacagtacaaatctcctaacgctaaacgtaagtacgctgagatcgccgaatacctgaacctgaagggtacgagcgacactgagaaagttactgcgctgatcgaagctatctctaaactgaaaattgacctgtccatcccgcagaacatcagcgccgcaggcatcaacaaaaaggacttttacaacacgctggacaaaatgagcgaactggcttttgacgaccagtgcaccactgcaaacccgcgttacccgctgatctctgagctgaaagacatttatatcaaatctttt

SEQ ID NO: 190 - DNA, 2573 bp, Artificial Sequence
  Synthetic Construct
atgaaagtgacgaaccaaaaagaactgaaacaaaaactgaatgaactgcgtgaggcccagaaaaagttcgctacgtatacccaggcgcaagttgacaagatcttcaaacagtgtgccattgcggctgccaaagagcgtattaacttggccaaactggcggtggaagaaaccggcatcggtctggtcgaggacaagattatcaagaatcactttgccgcggagtatatctacaacaaatacaaaaacgaaaagacttgcggcatcattgatcatgatgacagcttgggtatcacgaaagtcgcagaaccaatcggtattgtcgcggcaattgtcccgaccactaatccgaccagcaccgcgatcttcaagagcttgatcagcctgaaaacccgcaacgcgattttcttcagcccgcacccgcgtgcgaagaagagcaccatcgcagcggcgaagctgattttggatgccgcggttaaggccggtgcaccgaaaaacattattggctggattgacgagccgagcattgagctgtctcaggacctgatgagcgaagcggacattattctggccaccggtggtccgtctatggttaaggcagcgtactccagcggtaagcctgctatcggcgttggtgcgggcaatacgccggctatcatcgatgaaagcgcggatattgatatggcagttagctccatcattctgtccaaaacctacgacaatggtgttatctgtgcaagcgagcaaagcatcctggtgatgaatagcatttacgagaaggtcaaagaagagtttgttaagcgtggttcctatattctgaaccagaacgagattgcaaaaatcaaagaaacgatgtttaagaatggcgcgattaatgcagatattgttggtaagtccgcatacattatcgcgaagatggcgggtatcgaagtgccgcaaaccaccaaaatcttgatcggcgaagtgcaggacgtggagaagagcgaactgttcagccatgagaaactgagcccggttctggctatgtacaaagtgaaggactttgacgaagccctgaagaaagctcagcgtctgattgagctgggcggcagcggtcacacgagcagcctgtatatcgatagccaaaacaataaggacaaggtgaaagagttcggtctggcgatgaaaacctctcgcacgtttatcaacatgccgagcagccaaggtgcgagcggcgatctgtataacttcgcaatcgcgccttcttttacgctgggttgcccgacctggggcggtaattcggtgagccagaatgtcgagccgaagcacctgctgaacatcaaatcggtcgcggagcgccgtgagaagagacctggttcaaagtcccacagaaaatttacttcaaatacggctgcctgcgtttcgcgctgaaagaactgaaagacatgaacaaaaagcgtgcgttcattgttaccgacaaagacctgttcaaactgggttacgtgaacaaaatcaccaaagttctggatgaaattgacatcaagtactccatcttcactgatatcaaatccgacccaacgattgatagcgtgaaaaagggcgctaaagaaatgctgaactttgaaccggacaccatcatcagcatcggtggtggctctcctatggatgctgcgaaggtcatgcacctgctgtacgaatacccggaagcggaaatcgaaaacctggctatcaacttcatggacatccgcaaacgtatctgcaacttcccgaagctgggcactaaagctatttccgttgccatcccgactaccgcgggcactggttccgaagccacgccgttcgccgtgatcaccaacgatgaaaccggtatgaaatacccgctgacctcttacgaactgaccccgaacatggcaattatcgacaccgagctgatgctgaacatgccgcgcaagctgaccgctgctaccggcatcgacgctctggtacatgctattgaggcgtacgtttccgtgatggctaccgattacaccgacgaactggccctgcgtgcgatcaaaatgattttcaagtacctgcctcgcgcttacaaaaacggcacgaatgacatcgaggcgcgtgagaaaatggcccatgcaagcaacatcgcgggcatggccttcgccaacgcgttcctgggcgtgtgccactctatggctcacaaactgggtgctatgcaccacgtgccgcacggtatcgcgtgtgctgtcctgatcgaagaagtaattaagtacaacgctactgattgcccgactaaacagaccgccttcccacagtacaaatctcctaacgctaaacgtaagtacgctgagatcgccgaatacctgaacctgaagggtacgagcgacactgagaaagttactgcgctgatcgaagctatctctaaactgaaaattgacctgtccatcccgcagaacatcagcgccgcaggcatcaacaaaaaggacttttacaacacgctggacaaaatgagcgaactggcttttgacgaccagtgcaccactgcaaacccgcgttacccgctgatctctgagctgaaagacatttatatcaaatctttt

SEQ ID NO: 191 - DNA, 2573 bp, Artificial Sequence
  Synthetic Construct
atgaaagtgacgaaccaaaaagaactgaaacaaaaactgaatgaactgcgtgaggcccagaaaaagttcgctacgatgacccaggagcaagttgacaagatcttcaaacagtgtgccattgcggctgccaaagagcgtattaacttggccaaactggcggtggaagaaaccggcatcggtctggtcgaggacaagattatcaagaatcactttgccgcggagtatatctacaacaaatacaaaaacgaaaagacttgcggcatcattgatcatgatgacagcttgggtatcacgaaagtcgcagaaccaatcggtattgtcgcggcaattgtcccgaccactaatccgaccagcaccgcgatcttcaagagcttgatcagcctgaaaacccgcaacgcgattttcttcagcccgcacccgcgtgcgaagaagagcaccatcgcagcggcgaagctgattttggatgccgcggttaaggccggtgcaccgaaaaacattattggctggattgacgagccgagcattgagctgtctcaggacctgatgagcgaagcggacattattctggccaccggtggtccgtctatggttaaggcagcgtactccagcggtaagcctgctatcggcgttggtgcgggcaatacgccggctatcatcgatgaaagcgcggatattgatatggcagttagctccatcattctgtccaaaacctacgacaatggtgttatctgtgcaagcgagcaaagcatcctggtgatgaatagcatttacgagaaggtcaaagaagagtttgttaagcgtggttcctatattctgaaccagcaggagattgcaaaaatcaaagaaacgatgtttaagaatggcgcgattaatgcagatattgttggtaagtccgcatacattatcgcgaagatggcgggtatcgaagtgccgcaaaccaccaaaatcttgatcggcgaagtgcagagcgtggagaagagcgaactgttcagccatgagaaactgagcccggttctggctatgtacaaagtgaaggactttgacgaagccctgaagaaagctcagcgtctgattgagctgggcggcagcggtcacacgagcagcctgtatatcgatagccaaaacaataaggacaaggtgaaagagttcggtctggcgatgaaaacctctcgcacgtttatcaacatgccgagcagccaaggtgcgagcggcgatctgtataacttcgcaatcgcgccttcttttacgctgggttgcggtacctgggagggtaattcggtgagccagaatgtcgagccgaagcacctgctgaacatcaaatcggtcgcggagcgccgtgagaagagacctggttcaaagtcccacagaaaatttacttcaaatacggctgcctgcgtttcgcgctgaaagaactgaaagacatgaacaaaaagcgtgcgttcattgttaccgacaaagacctgttcaaactgggttacgtgaacaaaatcaccaaagttctggatgaaattgacatcaagtactccatcttcactgatatcaaatccgacccaacgattgatagcgtgaaaaagggcgctaaagaaatgctgaactttgaaccggacaccatcatcagcatcggtggtggctctcctatggatgctgcgaaggtcatgcacctgctgtacgaatacccggaagcggaaatcgaaaacctggctatcaacttcatggacatccgcaaacgtatctgcaacttcccgaagctgggcactaaagctatttccgttgccatcccgactaccgcgggcactggttccgaagccacgccgttcgccgtgatcaccaacgatgaaaccggtatgaaatacccgctgacctcttacgaactgaccccgaacatggcaattatcgacaccgagctgatgctgaacatgccgcgcaagctgaccgctgctaccggcatcgacgctctggtacatgctattgaggcgtacgtttccgtgatggctaccgattacaccgacgaactggccctgcgtgcgatcaaaatgattttcaagtacctgcctcgcgcttacaaaaacggcacgaatgacatcgaggcgcgtgagaaaatggcccatgcaagcaacatcgcgggcatggccttcgccaacgcgttcctgggcgtgtgccactctatggctcacaaactgggtgctatgcaccacgtgccgcacggtatcgcgtgtgctgtcctgatcgaagaagtaattaagtacaacgctactgattgcccgactaaacagaccgccttcccacagtacaaatctcctaacgctaaacgtaagtacgctgagatcgccgaatacctgaacctgaagggtacgagcgacactgagaaagttactgcgctgatcgaagctatctctaaactgaaaattgacctgtccatcccgcagaacatcagcgccgcaggcatcaacaaaaaggacttttacaacacgctggacaaaatgagcgaactggcttttgacgaccagtgcaccactgcaaacccgcgttacccgctgatctctgagctgaaagacatttatatcaaatctttt

SEQ ID NO: 192 - DNA, 2573 bp, Artificial Sequence
  Synthetic Construct
atgaaagtgacgaaccaaaaagaactgaaacaaaaactgaatgaactgcgtgaggcccagaaaaagttcgctacgtatacccaggagcaagttgacaagatcttcaaacagtgtgccattgcggctgccaaagagcgtattaacttggccaaactggcggtggaagaaaccggcatcggtctggtcgaggacaagattatcaagaatcactttgccgcggagtatatctacaacaaatacaaaaacgaaaagacttgcggcatcattgatcatgatgacagcttgggtatcacgaaagtcgcagaaccaatcggtattgtcgcggcaattgtcccgaccactaatccgaccagcaccgcgatcttcaagagcttgatcagcctgaaaacccgcaacgcgattttcttcagcccgcacccgcgtgcgaagaagagcaccatcgcagcggcgaccctgattttggatgccgcggttaaggccggtgcaccgaaaaacattattggctggattgacgagccgagcattgagctgtctcaggacctgatgagcgaagcggacattattctggccaccggtggtccgtctatggttaaggcagcgtactccagcggtaagcctgctatcggcgttggtgcgggcaatacgccggctatcatcgatgaaagcgcggatattgatatggcagttagctccatcattctgtccaaaacctacgacaatggtgttatctgtgcaagcgagcaaagcatcctggtgatgaatagcatttacgagaaggtcaaagaagagtttgttaagcgtggttcctatattctgaaccagaacgagattgcaaaaatcaaagaaacgatgtttaagaatggcgcgattaatgcagatattgttggtaagtccgcatacattatcgcgaagatggcgggtatcgaagtgccgcaaaccaccaaaatcttgatcggcgaagtgcagagcgtggagaagagcgaactgttcagccatgagaaactgagcccggttctggctatgtacaaagtgaaggactttgacgaagccctgaagaaagctgagcgtctgattgagctgggcggcagcggtcacacgagcagcctgtatatcgatagccaaaacaataaggacaaggtgaaagagttcggtctggcgatgaaaacctctatcacgtttatcaacatgccgagcagccaaggtgcgagcggcgatctgtataacttcgcaatcgcgccttcttttacgctgggttgcggtacctggggcggtaattcggtgagccagaatgtcgagccgaagcacctgctgaacatcaaatcggtcgcggagcgccgtgagaagagacctggttcaaagtcccacagaaaatttacttcaaatacggctgcctgcgtttcgcgctgaaagaactgaaagacatgaacaaaaagcgtgcgttcattgttaccgacaaagacctgttcaaactgggttacgtgaacaaaatcaccaaagttctggatgaaattgacatcaagtactccatcttcactgatatcaaatccgacccaacgattgatagcgtgaaaaagggcgctaaagaaatgctgaactttgaaccggacaccatcatcagcatcggtggtggctctcctatggatgctgcgaaggtcatgcacctgctgtacgaatacccggaagcggaaatcgaaaacctggctatcaacttcatggacatccgcaaacgtatctgcaacttcccgaagctgggcactaaagctatttccgttgccatcccgactaccgcgggcactggttccgaagccacgccgttcgccgtgatcaccaacgatgaaaccggtatgaaatacccgctgacctcttacgaactgaccccgaacatggcaattatcgacaccgagctgatgctgaacatgccgcgcaagctgaccgctgctaccggcatcgacgctctggtacatgctattgaggcgtacgtttccgtgatggctaccgattacaccgacgaactggccctgcgtgcgatcaaaatgattttcaagtacctgcctcgcgcttacaaaaacggcacgaatgacatcgaggcgcgtgagaaaatggcccatgcaagcaacatcgcgggcatggccttcgccaacgcgttcctgggcgtgtgccactctatggctcacaaactgggtgctatgcaccacgtgccgcacggtatcgcgtgtgctgtcctgatcgaagaagtaattaagtacaacgctactgattgcccgactaaacagaccgccttcccacagtacaaatctcctaacgctaaacgtaagtacgctgagatcgccgaatacctgaacctgaagggtacgagcgacactgagaaagttactgcgctgatcgaagctatctctaaactgaaaattgacctgtccatcccgcagaacatcagcgccgcaggcatcaacaaaaaggacttttacaacacgctggacaaaatgagcgaactggcttttgacgaccagtgcaccactgcaaacccgcgttacccgctgatctctgagctgaaagacatttatatcaaatctttt

SEQ ID NO: 193 - DNA, 2573 bp, Artificial Sequence
  Synthetic Construct
atgaaagtgacgaaccaaaaagaactgaaacaaaaactgaatgaactgcgtgaggcccagaaaaagttcgctacgtatacccaggcgcaagttgagaagatcttcaaacagtgtgccattgcggctgccaaagagcgtattaacttggccaaactggcggtggaagaaaccggcatcggtctggtcgaggacaagattatcaagaatcactttgccgcggagtatatctacaacaaatacaaaaacgaaaagacttgcggcatcattgatcatgatgacagcttgggtatcacgaaagtcgcagaaccaatcggtattgtcgcggcaattgtcccgaccactaatccgaccagcaccgcgatcttcaagagcttgatcagcctgaaaacccgcaacgcgattttcttcagcccgcacccgcgtgcgaagaagagcaccatcgcagcggcgaagctgattttggatgccgcggttaaggccggtgcaccgaaaaacattattggctggattgacgagccgagcattgagctgtctcaggacctgatgagcgaagcggacattattctggccaccggtggtccgtctatggttaaggcagcgtactccagcggtaagcctgctatcggcgttggtgcgggcaatacgccggctatcatcgatgaaagcgcggatattgatatggcagttagctccatcattctgtccaaaacctacgacaatggtgttatctgtgcaagcgagcaaagcatcctggtgatgaatagcatttacgagaaggtcaaagaagagtttgttaagcgtggttcctatattctgaaccagaacgagattgcaaaaatcaaagaaacgatgtttaagaatggcgcgattaatgcagatattgttggtaagtccgcatacattatcgcgaagatggcgggtatcgaagtgccgcaaaccaccaaaatcttgatcggcgaagtgcagagcgtggagaagagcgaactgttcagccatgagaaactgagcccggttctggctatgtacaaagtgaaggactttgacgaagccctgaagaaagctcagcgtctgattgagctgggcggcagcggtcacacgagcagcctgtatatcgatagccaaaacaataaggacaaggtgaaagagttcggtctggcgatgaaaacctctcgcacgtttatcaacatgccgagcagccaaggtgcgagcggcgatctgtataacttcgcaatcgcgccttcttttacgctggcgtgcggtacctggggcggtaattcggtgagccagaatgtcgagccgaagcacctgctgaacatcaaatcggtcgcggagcgccgtgagaagagacctggttcaaagtcccacagaaaatttacttcaaatacggctgcctgcgtttcgcgctgaaagaactgaaagacatgaacaaaaagcgtgcgttcattgttaccgacaaagacctgttcaaactgggttacgtgaacaaaatcaccaaagttctggatgaaattgacatcaagtactccatcttcactgatatcaaatccgacccaacgattgatagcgtgaaaaagggcgctaaagaaatgctgaactttgaaccggacaccatcatcagcatcggtggtggctctcctatggatgctgcgaaggtcatgcacctgctgtacgaatacccggaagcggaaatcgaaaacctggctatcaacttcatggacatccgcaaacgtatctgcaacttcccgaagctgggcactaaagctatttccgttgccatcccgactaccgcgggcactggttccgaagccacgccgttcgccgtgatcaccaacgatgaaaccggtatgaaatacccgctgacctcttacgaactgaccccgaacatggcaattatcgacaccgagctgatgctgaacatgccgcgcaagctgaccgctgctaccggcatcgacgctctggtacatgctattgaggcgtacgtttccgtgatggctaccgattacaccgacgaactggccctgcgtgcgatcaaaatgattttcaagtacctgcctcgcgcttacaaaaacggcacgaatgacatcgaggcgcgtgagaaaatggcccatgcaagcaacatcgcgggcatggccttcgccaacgcgttcctgggcgtgtgccactctatggctcacaaactgggtgctatgcaccacgtgccgcacggtatcgcgtgtgctgtcctgatcgaagaagtaattaagtacaacgctactgattgcccgactaaacagaccgccttcccacagtacaaatctcctaacgctaaacgtaagtacgctgagatcgccgaatacctgaacctgaagggtacgagcgacactgagaaagttactgcgctgatcgaagctatctctaaactgaaaattgacctgtccatcccgcagaacatcagcgccgcaggcatcaacaaaaaggacttttacaacacgctggacaaaatgagcgaactggcttttgacgaccagtgcaccactgcaaacccgcgttacccgctgatctctgagctgaaagacatttatatcaaatctttt

SEQ ID NO: 194 - DNA, 2573 bp, Artificial Sequence
  Synthetic Construct
atgaaagtgacgaaccaaaaagaactgaaacaaaaactgaatgaactgcgtgaggcccagaaaaagttcgctacgtatacccaggagcaagttgacaagatcttcaaacagtgtgccattgcggctgccaaagagcgtattaacttggccgagctggcggtggaagaaaccggcatcggtctggtcgaggacaagattatcaagaatcactttgccgcggagtatatctacaacaaatacaaaaacgaaaagacttgcggcatcattgatcatgatgacagcttgggtatcacgaaagtcgcagaaccaatcggtattgtcgcgagcattgtcccgaccactaatccgaccagcaccgcgatcttcaagagcttgatcagcctgaaaacccgcaacgcgattttcttcagcccgcacccgcgtgcgaagaagagcaccatcgcagcggcgaagctgattttggatgccgcggttaaggccggtgcaccgaaaaacattattggctggattgacgagccgagcattgagctgtctcaggacctgatgagcgaaccggacattattctggccaccggtggtccgtctatggttaaggcagcgtactccagcggtaagcctgctatcggcgttggtgcgggcaatacgccggctatcatcgatgaaagcgcggatattgatatggcagttagctccatcattctgtccaaaacctacgacaatggtgttatctgtgcaagcgagcaaagcatcctggtgatgaatagcatttacgagaaggtcaaagaagagtttgttaagcgtggttcctatattctgaaccagaacgagattgcaaaaatcaaagaaacgatgtttaagaatggcgcgattaatgcagatattgttggtaagtccgcatacattatcgcgaagatggcgggtatcgaagtgccgcaaaccaccaaaatcttgatcggcgaagtgcagagcgtggagaagagcgaactgttcagccatgagaaactgagcccggttctggctatgtacaaagtgaaggactttgacgaagccctgaagaaagctcagcgtctgattgagctgggcggcagcggtcacacgagcagcctgtatatcgatagccaaaacaataaggacaaggtgaaagagttcggtctggcgatgaaaacctctcgcacgtttatcaacatgccgagcagccaaggtgcgagcggcgatctgtataacttcgcaatcgcgccttcttttacgctgggttgcggtacctggggcggtaattcggtgagccagaatgtcgagccgaagcacctgctgaacatcaaatcggtcgcggagcgccgtgagaagagacctggttcaaagtcccacagaaaatttacttcaaatacggctgcctgcgtttcgcgctgaaagaactgaaagacatgaacaaaaagcgtgcgttcattgttaccgacaaagacctgttcaaactgggttacgtgaacaaaatcaccaaagttctggatgaaattgacatcaagtactccatcttcactgatatcaaatccgacccaacgattgatagcgtgaaaaagggcgctaaagaaatgctgaactttgaaccggacaccatcatcagcatcggtggtggctctcctatggatgctgcgaaggtcatgcacctgctgtacgaatacccggaagcggaaatcgaaaacctggctatcaacttcatggacatccgcaaacgtatctgcaacttcccgaagctgggcactaaagctatttccgttgccatcccgactaccgcgggcactggttccgaagccacgccgttcgccgtgatcaccaacgatgaaaccggtatgaaatacccgctgacctcttacgaactgaccccgaacatggcaattatcgacaccgagctgatgctgaacatgccgcgcaagctgaccgctgctaccggcatcgacgctctggtacatgctattgaggcgtacgtttccgtgatggctaccgattacaccgacgaactggccctgcgtgcgatcaaaatgattttcaagtacctgcctcgcgcttacaaaaacggcacgaatgacatcgaggcgcgtgagaaaatggcccatgcaagcaacatcgcgggcatggccttcgccaacgcgttcctgggcgtgtgccactctatggctcacaaactgggtgctatgcaccacgtgccgcacggtatcgcgtgtgctgtcctgatcgaagaagtaattaagtacaacgctactgattgcccgactaaacagaccgccttcccacagtacaaatctcctaacgctaaacgtaagtacgctgagatcgccgaatacctgaacctgaagggtacgagcgacactgagaaagttactgcgctgatcgaagctatctctaaactgaaaattgacctgtccatcccgcagaacatcagcgccgcaggcatcaacaaaaaggacttttacaacacgctggacaaaatgagcgaactggcttttgacgaccagtgcaccactgcaaacccgcgttacccgctgatctctgagctgaaagacatttatatcaaatctttt

SEQ ID NO: 195 - DNA, 2573 bp, Artificial Sequence
  Synthetic Construct
atgaaagtgacgaaccaaaaagaactgaaacaaaaactgaatgaactgcgtgaggcccagaaaaagttcgctacgtatacccaggagcaagttgacaagatcttcaaacagtgtgccattgcggctgccaaagagcgtattaacttggccaaactggcggtggaagaaaccggcatcggtctggtcgaggacaagattatcaagaatcactttgccgcggagtatatctacaacaaatacaaaaacgaaaagacttgcggcatcattgatcatgatgacagcttgggtatcacgaaagtcgcagaaccaatcggtattgtcgcggcaattgtcccgaccactaatccgaccagcaccgcgatcttcaagagcttgatcagcctggcgacccgcaacgcgattttcttcagcccgcacccgcgtgcgaagaagagcaccatcgcagcggcgaagctgattttggatgccgcggttaaggccggtgcaccgaaaaacattattggctggattgacgagccgagcattgagctgtctcaggacctgatgagcgaagcggacattattctggccaccggtggtccgtctatggttaaggcagcgtactccagcggtaagcctgctatcggcgttggtgcgggcaatacgccggctatcatcgatgaaagcgcggatattgatatggcagttagctccatcattctgtccaaaacctacgacaataacgttatctgtgcaagcgagcaaagcatcctggtgatgaatagcatttacgagaaggtcaaagaagagtttgttaagcgtggttcctatattctgaaccagaacgagattgcaaaaatcaaagaaacgatgtttaagaatggcgcgattaatgcagatattgttggtaagtccgcatacattatcgcgaagatggcgggtatcgaagtgccgcaaaccaccaaaatcttgatcggcgaagtgcagagcgtggagaagagcgaactgttcagccatgagaaactgagcccggttctggctatgtacaaagtgaaggactttgacgaagccctgaagaaagctcagcgtctgattgagctgggcggcagcggtcacacgagcagcctgtatatcgatagccaaaacaataaggacaaggtgaaagagttcggtctgcgtatgaaaacctctcgcacgtttatcaacatgccgagcagccaaggtgcgagcggcgatctgtataacttcgcaatcgcgccttcttttacgctgggttgcggtacctggggcggtaattcggtgagccagaatgtcgagccgaagcacctgctgaacatcaaatcggtcgcggagcgccgtgagaagagacctggttcaaagtcccacagaaaatttacttcaaatacggctgcctgcgtttcgcgctgaaagaactgaaagacatgaacaaaaagcgtgcgttcattgttaccgacaaagacctgttcaaactgggttacgtgaacaaaatcaccaaagttctggatgaaattgacatcaagtactccatcttcactgatatcaaatccgacccaacgattgatagcgtgaaaaagggcgctaaagaaatgctgaactttgaaccggacaccatcatcagcatcggtggtggctctcctatggatgctgcgaaggtcatgcacctgctgtacgaatacccggaagcggaaatcgaaaacctggctatcaacttcatggacatccgcaaacgtatctgcaacttcccgaagctgggcactaaagctatttccgttgccatcccgactaccgcgggcactggttccgaagccacgccgttcgccgtgatcaccaacgatgaaaccggtatgaaatacccgctgacctcttacgaactgaccccgaacatggcaattatcgacaccgagctgatgctgaacatgccgcgcaagctgaccgctgctaccggcatcgacgctctggtacatgctattgaggcgtacgtttccgtgatggctaccgattacaccgacgaactggccctgcgtgcgatcaaaatgattttcaagtacctgcctcgcgcttacaaaaacggcacgaatgacatcgaggcgcgtgagaaaatggcccatgcaagcaacatcgcgggcatggccttcgccaacgcgttcctgggcgtgtgccactctatggctcacaaactgggtgctatgcaccacgtgccgcacggtatcgcgtgtgctgtcctgatcgaagaagtaattaagtacaacgctactgattgcccgactaaacagaccgccttcccacagtacaaatctcctaacgctaaacgtaagtacgctgagatcgccgaatacctgaacctgaagggtacgagcgacactgagaaagttactgcgctgatcgaagctatctctaaactgaaaattgacctgtccatcccgcagaacatcagcgccgcaggcatcaacaaaaaggacttttacaacacgctggacaaaatgagcgaactggcttttgacgaccagtgcaccactgcaaacccgcgttacccgctgatctctgagctgaaagacatttatatcaaatctttt

SEQ ID NO: 196 - DNA, 2573 bp, Artificial Sequence
  Synthetic Construct
atgaaagtgacgaaccaaaaagaactgaaacaaaaactgaatgaactgcgtgaggcccagaaaaagttcgctacgtatacccaggagcaagttgacaagatcttcaaacagtgtgccattgcggctgccaaagagcgtattaacttggcccgtctggcggtggaagaaaccggcatcggtctggtcgaggacaagattatcaagaatcactttgccgcggagtatatctacaacaaatacaaaaacgaaaagacttgcggcatcattgatcatgatgacagcttgggtatcacgaaagtcgcagaaccaatcggtattgtcgcggcaattgtcccgaccactaatccgaccagcaccgcgatcttcaagagcttgatcagcctgaaaacccgcaacgcgattttcttcagcccgcacccgcgtgcgaagaagagcaccatcgcagcggcgaagctgattttggatgccgcggttaaggccggtgcaccgaaaaacattattggctggattgacgagccgagcattgagctgtctcaggacctgatgagcgaagcggacattattctggccaccggtggtccgtctatggttaaggcagcgtactccagcggtaagcctgctatcggcgttggtgcgggcaatacgccggctatcatcgatgaaagcgcggatattgatatggcagttagctccatcattctgtccaaaacctacgacaatggtgttatctgtgcaagcgagcaaagcatcctggtgatgaatagcatttacgagaaggtcaaaaaagagtttgttaagcgtggttcctatattctgaaccagaacgagattgcaaaaatcaaagaaacgatgtttaagaatggcgcgattaatgcagatattgttggtaagtccgcatacattatcgcgaagatggcgggtatcgaagtgccgcaaaccaccaaaatcttgatcggcgaagtgcagagcgtggagaagagcgaactgttcagccatgagaaactgagcccggttctggctatgtacaaagtgaaggactttgacgaagccctgaagaaagctcagcgtctgattgagctgggcggcagcggtcacacgagcagcctgtatatcgatagccaaaacaataaggacaaggtgaaagagttcggtctggcgatgaaaacctctcgcttctttatcaacatgccgagcagccaaggtgcgagcggcgatctgtataacttcgcaatcgcgccttcttttacgctgggttgcggtacctggggcggtaattcggtgagccagaatgtcgagccgaagcacctgctgaacatcaaatcggtcgcggagcgccgtgagaagagacctggttcaaagtcccacagaaaatttacttcaaatacggctgcctgcgtttcgcgctgaaagaactgaaagacatgaacaaaaagcgtgcgttcattgttaccgacaaagacctgttcaaactgggttacgtgaacaaaatcaccaaagttctggatgaaattgacatcaagtactccatcttcactgatatcaaatccgacccaacgattgatagcgtgaaaaagggcgctaaagaaatgctgaactttgaaccggacaccatcatcagcatcggtggtggctctcctatggatgctgcgaaggtcatgcacctgctgtacgaatacccggaagcggaaatcgaaaacctggctatcaacttcatggacatccgcaaacgtatctgcaacttcccgaagctgggcactaaagctatttccgttgccatcccgactaccgcgggcactggttccgaagccacgccgttcgccgtgatcaccaacgatgaaaccggtatgaaatacccgctgacctcttacgaactgaccccgaacatggcaattatcgacaccgagctgatgctgaacatgccgcgcaagctgaccgctgctaccggcatcgacgctctggtacatgctattgaggcgtacgtttccgtgatggctaccgattacaccgacgaactggccctgcgtgcgatcaaaatgattttcaagtacctgcctcgcgcttacaaaaacggcacgaatgacatcgaggcgcgtgagaaaatggcccatgcaagcaacatcgcgggcatggccttcgccaacgcgttcctgggcgtgtgccactctatggctcacaaactgggtgctatgcaccacgtgccgcacggtatcgcgtgtgctgtcctgatcgaagaagtaattaagtacaacgctactgattgcccgactaaacagaccgccttcccacagtacaaatctcctaacgctaaacgtaagtacgctgagatcgccgaatacctgaacctgaagggtacgagcgacactgagaaagttactgcgctgatcgaagctatctctaaactgaaaattgacctgtccatcccgcagaacatcagcgccgcaggcatcaacaaaaaggacttttacaacacgctggacaaaatgagcgaactggcttttgacgaccagtgcaccactgcaaacccgcgttacccgctgatctctgagctgaaagacatttatatcaaatctttt

SEQ ID NO: 197 - DNA, 2573 bp, Artificial Sequence
  Synthetic Construct
atgaaagtgacgaaccaaaaagaactgaaacaaaaactgaatgaactgcgtgaggcccagaaaaagttcaacacgtatacccaggagcaagttgacaagatcttcaaacagtgtgccattgcggctgccaaagagcgtattaacttggccaaactggcggtggaagaaaccggcatcggtctggtcgaggacaagattatcaagaatcactttgccgcggagtatatctacaacaaatacaaaaacgaaaagacttgcggcatcattgatcatgatgacagcttgggtatcacgaaagtcgcagaaccaatcggtattgtcgcggcaattgtcccgaccactaatccgaccagcaccgcgatcttcaagagcttgatcagcctgaaaacccgcaacgcgattttcttcagcccgcacccgcgtgcgaagaagagcaccatcgcagcggcgaagctgattttggatgccgcggttaaggccggtgcaccgaaaaacattattggctggattgacgagccgagcattgagctgtctcaggacctgatgagcgaagcggacattattctggccaccggtggtccgtctatggttaaggcagcgtactccagcggtaagcctgctatcggcgttggtgcgggcaatacgccggctatcatcgatgaaagcgcggatattgatatggcagttagctccatcattctgtccaaaacctacgacaatggtgttatctgtgcaagcgagcaaagcatcctggtgatgaatagcatttacgagaaggtcaaagaagagtttgttaagcgtggttcctatattctgaaccagaacgagattgcaaaaatcaaagaaacgatgtttaagaatggcgcgattaatgcagatattgttggtaagtccgcatacattatcgcgaagatggcgggtatcgaagtgccgcaaaccaccaaaatcttgatcggcgaagtgcagcacgtggagaagagcgaactgttcagccatgagaaactgagcccggttctggctatgtacaaagtgaaggactttgacgaagccctgaagaaagctcagcgtctgattgagctgggcggcagcggtcacacgagcagcctgtatatcgatagccaaaacaataaggacaaggtgaaagagttcggtctggcgatgaaaacctctcgcacgtttatcaacatgccgagcagccaaggtgcgagcggcgatctgtataacttcgcaatcgcgccttcttttacgctgggttgcggtacctggggcggtaattcggtgagccagaatgtcgagccgaagcacctgctgaacatcaaatcggtcgcgcgtcgccgtgagaagagacctggttcaaagtcccacagaaaatttacttcaaatacggctgcctgcgtttcgcgctgaaagaactgaaagacatgaacaaaaagcgtgcgttcattgttaccgacaaagacctgttcaaactgggttacgtgaacaaaatcaccaaagttctggatgaaattgacatcaagtactccatcttcactgatatcaaatccgacccaacgattgatagcgtgaaaaagggcgctaaagaaatgctgaactttgaaccggacaccatcatcagcatcggtggtggctctcctatggatgctgcgaaggtcatgcacctgctgtacgaatacccggaagcggaaatcgaaaacctggctatcaacttcatggacatccgcaaacgtatctgcaacttcccgaagctgggcactaaagctatttccgttgccatcccgactaccgcgggcactggttccgaagccacgccgttcgccgtgatcaccaacgatgaaaccggtatgaaatacccgctgacctcttacgaactgaccccgaacatggcaattatcgacaccgagctgatgctgaacatgccgcgcaagctgaccgctgctaccggcatcgacgctctggtacatgctattgaggcgtacgtttccgtgatggctaccgattacaccgacgaactggccctgcgtgcgatcaaaatgattttcaagtacctgcctcgcgcttacaaaaacggcacgaatgacatcgaggcgcgtgagaaaatggcccatgcaagcaacatcgcgggcatggccttcgccaacgcgttcctgggcgtgtgccactctatggctcacaaactgggtgctatgcaccacgtgccgcacggtatcgcgtgtgctgtcctgatcgaagaagtaattaagtacaacgctactgattgcccgactaaacagaccgccttcccacagtacaaatctcctaacgctaaacgtaagtacgctgagatcgccgaatacctgaacctgaagggtacgagcgacactgagaaagttactgcgctgatcgaagctatctctaaactgaaaattgacctgtccatcccgcagaacatcagcgccgcaggcatcaacaaaaaggacttttacaacacgctggacaaaatgagcgaactggcttttgacgaccagtgcaccactgcaaacccgcgttacccgctgatctctgagctgaaagacatttatatcaaatctttt

SEQ ID NO: 198 - DNA, 2573 bp, Artificial Sequence
  Synthetic Construct
atgaaagtgacgaaccaaaaagaactgaaacaaaaagacaatgaactgcgtgaggcccagaaaaagttcgctacgtatacccaggagcaagttgacaagatcttcaaacagtgtgccattgcggctgccaaagagcgtattaacttggccaaactggcggtggaagaaaccggcatcggtctggtcgaggacaagattatcaagaatcactttgccgcggagtatatctacaacaaatacaaaaacgaaaagacttgcggcatcattgatcatgatgacagcttgggtatcacgaaagtcgcagaaccaatcggtattgtcgcggcaattgtcccgaccactaatccgaccagcaccgcgatcttcaagagcttgatcagcctgaaaacccgcaacgcgattttcttcagcccgcacccgcgtgcgaagaagagcaccatcgcagcggcgaagctgattttggatgccgcggttaaggccggtgcaccgaaaaacattattggctggattgacgagccgagcattgagctgtctcaggacatgatgagcgaagcggacattattctggccaccggtggtccgtctatggttaaggcagcgtactccagcggtaagcctgctatcggcgttggtgcgggcaatacgccggctatcatcgatgaaagcgcggatattgatatggcagttagctccatcattctgtccaaaacctacgacaatggtgttatctgtgcaagcgagcaaagcatcctggtgatgaatagcatttacgagaaggtcaaagaagagtttgttaagcgtggttcctatattctgaaccagaacgcgattgcaaaaatcaaagaaacgatgtttaagaatggcgcgattaatgcagatattgttggtaagtccgcatacattatcgcgaagatggcgggtatcgaagtgccgcaaaccaccaaaatcttgatcggcgaagtgcagagcgtggagaagagcgaactgttcagccatgagaaactgagcccggttctggctatgtacaaagtgaaggactttgacgaagccctgaagaaagctcagcgtctgattgagctgggcggcagcggtcacacgagcagcctgtatatcgatagccaaaacaataaggacaaggtgaaagagttcggtctggcgatgaaaacctctcgcacgtttatcaacatgccgagcagccaaggtgcgagcggcgatctgtataacttcgcaatcgcgccttcttttacgctgggttgcggtacctggggcggtaattcggtgagccagaatgtcgagccgaagcacctgctgaacatcaaatcggtcgcggagcgccgtgagaagagacctggttcaaagtcccacagaaaatttacttcaaatacggctgcctgcgtttcgcgctgaaagaactgaaagacatgaacaaaaagcgtgcgttcattgttaccgacaaagacctgttcaaactgggttacgtgaacaaaatcaccaaagttctggatgaaattgacatcaagtactccatcttcactgatatcaaatccgacccaacgattgatagcgtgaaaaagggcgctaaagaaatgctgaactttgaaccggacaccatcatcagcatcggtggtggctctcctatggatgctgcgaaggtcatgcacctgctgtacgaatacccggaagcggaaatcgaaaacctggctatcaacttcatggacatccgcaaacgtatctgcaacttcccgaagctgggcactaaagctatttccgttgccatcccgactaccgcgggcactggttccgaagccacgccgttcgccgtgatcaccaacgatgaaaccggtatgaaatacccgctgacctcttacgaactgaccccgaacatggcaattatcgacaccgagctgatgctgaacatgccgcgcaagctgaccgctgctaccggcatcgacgctctggtacatgctattgaggcgtacgtttccgtgatggctaccgattacaccgacgaactggccctgcgtgcgatcaaaatgattttcaagtacctgcctcgcgcttacaaaaacggcacgaatgacatcgaggcgcgtgagaaaatggcccatgcaagcaacatcgcgggcatggccttcgccaacgcgttcctgggcgtgtgccactctatggctcacaaactgggtgctatgcaccacgtgccgcacggtatcgcgtgtgctgtcctgatcgaagaagtaattaagtacaacgctactgattgcccgactaaacagaccgccttcccacagtacaaatctcctaacgctaaacgtaagtacgctgagatcgccgaatacctgaacctgaagggtacgagcgacactgagaaagttactgcgctgatcgaagctatctctaaactgaaaattgacctgtccatcccgcagaacatcagcgccgcaggcatcaacaaaaaggacttttacaacacgctggacaaaatgagcgaactggcttttgacgaccagtgcaccactgcaaacccgcgttacccgctgatctctgagctgaaagacatttatatcaaatctttt

SEQ ID NO: 199 - DNA, 2573 bp, Artificial Sequence
  Synthetic Construct
atgaaagtgacgaaccaaaaagaactgaaacaaaaactgaatgaactgcgtgaggcccagaaaaagttcgctacgtatacccaggcgcaagttgacaagatcttcaaacagtgtgccattgcggctgccaaataccgtattaacttggccaaactggcggtggaagaaaccggcatcggtctggtcgaggacaagattatcaagaatcactttgccgcggagtatatctacaacaaatacaaaaacgaaaagacttgcggcatcattgatcatgatgacagcttgggtatcacgaaagtcgcagaaccaatcggtattgtcgcggcaattgtcccgaccactaatccgaccagcaccgcgatcttcaagagcttgatcagcctgaaaacccgcaacgcgattttcttcagcccgcacccgcgtgcgaagaagagcaccatcgcagcggcgaagctgattttggatgccgcggttaaggccggtgcaccgaaaaacattattggctggattgacgagccgagcattgagctgtctcaggacctgatgagcgaagcggacattattctggccaccggtggtccgtctatggttaaggcagcgtactccagcggtaagcctgctatcggcgttggtgcgggcaatacgccggctatcatcgatgaaagcgcggatattgatatggcagttagctccatcattctgtccaaaacctacgacaatggtgttatctgtgcaagcgagcaaagcatcctggtgatgaatagcatttacgagaaggtcaaagaagagtttgttaagcgtggttcctatattctgaaccagaacgagattgcaaaaatcaaagaaacgatgtttaagaatggcgcgattaatgcagatattgttggtaagtccgcatacattatcgcgaagatggcgggtatcgaagtgccgcaaaccaccaaaatcttgatcggcgaagtgcagagcgtggagaagagcgaactgttcagccatgagaaactgagcccggttctggctatgtacaaagtgaaggactttgacgaagccctgaagaaagctcagcgtctgattcacctgggcggcagcggtcacacgagcagcctgtatatcgatagccaaaacaataaggacaaggtgaaagagttcggtctggcgatgaaaacctctcgcacgtttatcaacatgccgagcagccaaggtgcgagcggcgatctgtataacttcgcaatcgcgccttcttttacgctgggttgcggtacctggggcggtaattcggtgagccagaatgtcgagccgaagcacctgctgaacatcaaatcggtcgcggagcgccgtgagaagagacctggttcaaagtcccacagaaaatttacttcaaatacggctgcctgcgtttcgcgctgaaagaactgaaagacatgaacaaaaagcgtgcgttcattgttaccgacaaagacctgttcaaactgggttacgtgaacaaaatcaccaaagttctggatgaaattgacatcaagtactccatcttcactgatatcaaatccgacccaacgattgatagcgtgaaaaagggcgctaaagaaatgctgaactttgaaccggacaccatcatcagcatcggtggtggctctcctatggatgctgcgaaggtcatgcacctgctgtacgaatacccggaagcggaaatcgaaaacctggctatcaacttcatggacatccgcaaacgtatctgcaacttcccgaagctgggcactaaagctatttccgttgccatcccgactaccgcgggcactggttccgaagccacgccgttcgccgtgatcaccaacgatgaaaccggtatgaaatacccgctgacctcttacgaactgaccccgaacatggcaattatcgacaccgagctgatgctgaacatgccgcgcaagctgaccgctgctaccggcatcgacgctctggtacatgctattgaggcgtacgtttccgtgatggctaccgattacaccgacgaactggccctgcgtgcgatcaaaatgattttcaagtacctgcctcgcgcttacaaaaacggcacgaatgacatcgaggcgcgtgagaaaatggcccatgcaagcaacatcgcgggcatggccttcgccaacgcgttcctgggcgtgtgccactctatggctcacaaactgggtgctatgcaccacgtgccgcacggtatcgcgtgtgctgtcctgatcgaagaagtaattaagtacaacgctactgattgcccgactaaacagaccgccttcccacagtacaaatctcctaacgctaaacgtaagtacgctgagatcgccgaatacctgaacctgaagggtacgagcgacactgagaaagttactgcgctgatcgaagctatctctaaactgaaaattgacctgtccatcccgcagaacatcagcgccgcaggcatcaacaaaaaggacttttacaacacgctggacaaaatgagcgaactggcttttgacgaccagtgcaccactgcaaacccgcgttacccgctgatctctgagctgaaagacatttatatcaaatctttt

SEQ ID NO: 200 - DNA, 2573 bp, Artificial Sequence
  Synthetic Construct
atgaaagtgacgaaccaaaaagaactgaaacaaaaactgaatgaactgcgtgaggcccagaaaaagttcgctacgtatacccaggagcaagttgacaagatcttcaaacagtgtgccattgcggctgccaaagagcgtattaacttggccaaactggcggtggaagaaaccggcatcggtctggtcgaggacaagattatcaagaatcactttgccgcggagtatatctacaacaaatacaaaaacggtaagacttgcggcatcattgatcatgatgacagcttgggtatcacgaaagtcgcagaaccaatcggtattgtcgcggcaattgtcccgaccactaatccgaccagcaccgcgatcttcaagagcttgatcagcctgaaaacccgcaacgcgattttcttcagcccgcacccgcgtgcgaagaagagcaccatcgcagcggcgaagctgattttggatgccgcggttaaggccggtgcaccgaaaaacattattggctggattgacgagccgagcattgagctgtctcaggacctgatgagcgaagcggacattattctggccaccggtggtccgtctatggttaaggcagcgtactccagcggtaagcctgctatcggcgttggtgcgggcaatacgccggctatcatcgatgaaagcgcggatattgatatggcagttagctccatcattctgtccaaaacctacgacaatggtgttatctgtgcaagcgagcaaagcatcctggtgatgaatagcatttacgagaaggtcaaagcggagtttgttaagcgtggttcctatattctgaaccagaacgagattgcaaaaatcaaagaaacgatgtttaagaatggcgcgattaatgcagatattgttggtaagtccgcatacattatcgcgaagatggcgggtatcgaagtgccgcaaaccaccaaaatcttgatcggcgaagtgcagagcgtggagaagagcgaactgttcagccatgagaaactgagcccggttctggctatgtacaaagtgaaggactttgacgaagccctggacaaagctcagcgtctgattgagctgggcggcagcggtcacacgagcagcctgtatatcgatagccaaaacaataaggacaaggtgaaagagttcggtctggcgatgaaaacctctcgcacgtttatcaacatgccgagcagccaaggtgcgagcggcgatctgtataacttcgcaatcgcgccttcttttacgctgggttgcggtacctggggcggtaattcggtgagccagaatgtcgagccgaagcacctgctgaacatcaaatcggtcgcggagcgccgtgagaagagacctggttcaaagtcccacagaaaatttacttcaaatacggctgcctgcgtttcgcgctgaaagaactgaaagacatgaacaaaaagcgtgcgttcattgttaccgacaaagacctgttcaaactgggttacgtgaacaaaatcaccaaagttctggatgaaattgacatcaagtactccatcttcactgatatcaaatccgacccaacgattgatagcgtgaaaaagggcgctaaagaaatgctgaactttgaaccggacaccatcatcagcatcggtggtggctctcctatggatgctgcgaaggtcatgcacctgctgtacgaatacccggaagcggaaatcgaaaacctggctatcaacttcatggacatccgcaaacgtatctgcaacttcccgaagctgggcactaaagctatttccgttgccatcccgactaccgcgggcactggttccgaagccacgccgttcgccgtgatcaccaacgatgaaaccggtatgaaatacccgctgacctcttacgaactgaccccgaacatggcaattatcgacaccgagctgatgctgaacatgccgcgcaagctgaccgctgctaccggcatcgacgctctggtacatgctattgaggcgtacgtttccgtgatggctaccgattacaccgacgaactggccctgcgtgcgatcaaaatgattttcaagtacctgcctcgcgcttacaaaaacggcacgaatgacatcgaggcgcgtgagaaaatggcccatgcaagcaacatcgcgggcatggccttcgccaacgcgttcctgggcgtgtgccactctatggctcacaaactgggtgctatgcaccacgtgccgcacggtatcgcgtgtgctgtcctgatcgaagaagtaattaagtacaacgctactgattgcccgactaaacagaccgccttcccacagtacaaatctcctaacgctaaacgtaagtacgctgagatcgccgaatacctgaacctgaagggtacgagcgacactgagaaagttactgcgctgatcgaagctatctctaaactgaaaattgacctgtccatcccgcagaacatcagcgccgcaggcatcaacaaaaaggacttttacaacacgctggacaaaatgagcgaactggcttttgacgaccagtgcaccactgcaaacccgcgttacccgctgatctctgagctgaaagacatttatatcaaatctttt

SEQ ID NO: 201 - DNA, 2573 bp, Artificial Sequence
  Synthetic Construct
atgaaagtgacgaaccaaaaagaactgaaacaaaaactgaatgaactgcgtgaggcccagaaaaagttcgctacgtatacccaggagcaagttgacaagatcttcaaacagtgtgccattgcggctgccaaactgcgtattaacttggccgagctggcggtggaagaaaccggcatcggtctggtcgaggacaagattatcaagaatcactttgccgcggagtatatctacaacaaatacaaaaacgaaaagacttgcggcatcattgatcatgatgacagcttgggtatcacgaaagtcgcagaaccaatcggtattgtcgcggcaattgtcccgaccactaatccgaccagcaccgcgatcttcaagagcttgatcagcctgaaaacccgcaacgcgattttcttcagcccgcacccgcgtgcgaagaagagcaccatcgcagcggcgaagctgattttggatgccgcggttaaggccggtgcaccgaaaaacattattggctggattgacgagccgagcattgagctgtctcaggacctgatgagcgaagcggacattattctggccaccggtggtccgtctatggttaaggcagcgtactccagcggtaagcctgctatcggcgttggtgcgggcaatacgccggctatcatcgatgaaagcgcggatattgatatggcagttagctccatcattctgtccaaaacctacgacaatggtgttatctgtgcaagcgagcaaagcatcctggtgatgaatagcatttacgagaaggtcaaagaagagtttgttaagcgtggttcctatattctgaaccagaacgagattgcaaaaatcaaagaaacgatgtttaagaatggcgcgattaatgcagatattgttggtaagtccgcatacattatcgcgaagatggcgggtatcgaagtgccgcaaaccaccaaaatcttgatcggcgaagtgcagagcgtggagaagagcgaactgttcagcgttgagaaactgagcccggttctggctatgtacaaagtgaaggactttgacgaagccctgaagaaagctcagcgtctgattgagctgggcggcagcggtcacacgagcagcctgtatatcgatagccaaaacaataaggacaaggtgaaagagttcggtctggcgatgaaaacctctcgcacgtttatcaacatgccgagcagccaaggtgcgagcggcgatctgtataacttcgcaatcgcgccttcttttacgctgggttgcggtacctggggcggtaattcggtgagccagaatgtcgagccgaagcacctgctgaacatcaaatcggtcgcggagcgccgtgagaagagacctggttcaaagtcccacagaaaatttacttcaaatacggctgcctgcgtttcgcgctgaaagaactgaaagacatgaacaaaaagcgtgcgttcattgttaccgacaaagacctgttcaaactgggttacgtgaacaaaatcaccaaagttctggatgaaattgacatcaagtactccatcttcactgatatcaaatccgacccaacgattgatagcgtgaaaaagggcgctaaagaaatgctgaactttgaaccggacaccatcatcagcatcggtggtggctctcctatggatgctgcgaaggtcatgcacctgctgtacgaatacccggaagcggaaatcgaaaacctggctatcaacttcatggacatccgcaaacgtatctgcaacttcccgaagctgggcactaaagctatttccgttgccatcccgactaccgcgggcactggttccgaagccacgccgttcgccgtgatcaccaacgatgaaaccggtatgaaatacccgctgacctcttacgaactgaccccgaacatggcaattatcgacaccgagctgatgctgaacatgccgcgcaagctgaccgctgctaccggcatcgacgctctggtacatgctattgaggcgtacgtttccgtgatggctaccgattacaccgacgaactggccctgcgtgcgatcaaaatgattttcaagtacctgcctcgcgcttacaaaaacggcacgaatgacatcgaggcgcgtgagaaaatggcccatgcaagcaacatcgcgggcatggccttcgccaacgcgttcctgggcgtgtgccactctatggctcacaaactgggtgctatgcaccacgtgccgcacggtatcgcgtgtgctgtcctgatcgaagaagtaattaagtacaacgctactgattgcccgactaaacagaccgccttcccacagtacaaatctcctaacgctaaacgtaagtacgctgagatcgccgaatacctgaacctgaagggtacgagcgacactgagaaagttactgcgctgatcgaagctatctctaaactgaaaattgacctgtccatcccgcagaacatcagcgccgcaggcatcaacaaaaaggacttttacaacacgctggacaaaatgagcgaactggcttttgacgaccagtgcaccactgcaaacccgcgttacccgctgatctctgagctgaaagacatttatatcaaatctttt

SEQ ID NO: 202 - DNA, 2573 bp, Artificial Sequence
  Synthetic Construct
atgaaagtgacgaaccaaaaagaactgaaacaaaaactgaatgaactgcgtgaggcccagaaaaagttcgctacgtgcacccaggagcaagttgacaagatcttcaaacagtgtgccattgcggctgccaaagagcgtattaacttggccaaactggcggtggaagaaaccggcatcggtctggtcgaggacaagattatcaagaatcactttgccgcggagtatatctacaacaaatacaaaaacggtaagacttgcggcatcattgatcatgatgacagcttgggtatcacgaaagtcgcagaaccaatcggtattgtcgcggcaattgtcccgaccactaatccgaccagcaccgcgatcttcaagagcttgatcagcctgaaaacccgcaacgcgattttcttcagcccgcacccgcgtgcgaagaagagcaccatcgcagcggcgaagctgattttggatgccgcggttaaggccggtgcaccgaaaaacattattggctggattgacgagccgagcattgagctgtctcaggacctgatgagcgaagcggacattattctggccaccggtggtccgtctatggttaaggcagcgtactccagcggtaagcctgctatcggcgttggtgcgggcaatacgccggctatcatcgatgaaagcgcggatattgatatggcagttagctccatcattctgtccaaaacctacgacaatggtgttatctgtgcaagcgagcaaagcatcctggtgatgaatagcatttacgagaaggtcaaagaagagtttgttaagcgtggttcctatattctgaaccagaacgagattgcaaaaatcaaagaaacgatgtttaagaatggcgcgattaatgcagatattgttggtaagtccgcatacattatcgcgaagatggcgggtatcgaagtgccgcaaaccaccaaaatcttgatcggcgaagtgcagagcgtggaggcgagcgaactgttcagccatgagaaactgagcccggttctggctatgtacaaagtgaaggactttgacgaagccctgaagaaagctcagcgtctgattgagctgggcggcagcggtcacacgagcagcctgtatatcgatagccaaaacaataaggacaaggtgaaagagttcggtctggcgatgaaaacctctcgcacgtttatcaacatgccgagcagccaaggtgcgagcggcgatctgtataacttcgcaatcgcgccttcttttacgctgggttgcggtacctggggcggtaattcggtgagccagaatgtcgagccgaagcacctgctgaacatcaaatcggtcgcggagcgccgtgagaagagacctggttcaaagtcccacagaaaatttacttcaaatacggctgcctgcgtttcgcgctgaaagaactgaaagacatgaacaaaaagcgtgcgttcattgttaccgacaaagacctgttcaaactgggttacgtgaacaaaatcaccaaagttctggatgaaattgacatcaagtactccatcttcactgatatcaaatccgacccaacgattgatagcgtgaaaaagggcgctaaagaaatgctgaactttgaaccggacaccatcatcagcatcggtggtggctctcctatggatgctgcgaaggtcatgcacctgctgtacgaatacccggaagcggaaatcgaaaacctggctatcaacttcatggacatccgcaaacgtatctgcaacttcccgaagctgggcactaaagctatttccgttgccatcccgactaccgcgggcactggttccgaagccacgccgttcgccgtgatcaccaacgatgaaaccggtatgaaatacccgctgacctcttacgaactgaccccgaacatggcaattatcgacaccgagctgatgctgaacatgccgcgcaagctgaccgctgctaccggcatcgacgctctggtacatgctattgaggcgtacgtttccgtgatggctaccgattacaccgacgaactggccctgcgtgcgatcaaaatgattttcaagtacctgcctcgcgcttacaaaaacggcacgaatgacatcgaggcgcgtgagaaaatggcccatgcaagcaacatcgcgggcatggccttcgccaacgcgttcctgggcgtgtgccactctatggctcacaaactgggtgctatgcaccacgtgccgcacggtatcgcgtgtgctgtcctgatcgaagaagtaattaagtacaacgctactgattgcccgactaaacagaccgccttcccacagtacaaatctcctaacgctaaacgtaagtacgctgagatcgccgaatacctgaacctgaagggtacgagcgacactgagaaagttactgcgctgatcgaagctatctctaaactgaaaattgacctgtccatcccgcagaacatcagcgccgcaggcatcaacaaaaaggacttttacaacacgctggacaaaatgagcgaactggcttttgacgaccagtgcaccactgcaaacccgcgttacccgctgatctctgagctgaaagacatttatatcaaatctttt

SEQ ID NO: 203 - DNA, 2573 bp, Artificial Sequence
  Synthetic Construct
atgaaagtgacgaaccaaaaagaactgaaacaaaaagacaatgaactgcgtgaggcccagaaaaagttcgctacgtatacccaggagcaagttgacaagatcttcaaacagtgtgccattgcggctgccaaagagcgtattaacttggccgagctggcggtggaagaaaccggcatcggtctggtcgaggacaagattatcaagaatcactttgccgcggagtatatctacaacaaatacaaaaacgaaaagacttgcggcatcattgatcatgatgacagcttgggtatcacgaaagtcgcagaaccaatcggtattgtcgcggcaattgtcccgaccactaatccgaccagcaccgcgatcttcaagagcttgatcagcctgaaaacccgcaacgcgattttcttcagcccgcacccgcgtgcgaagaagagcaccatcgcagcggcgaagctgattttggatgccgcggttaaggccggtgcaccgaaaaacattattggctggattgacgagccgagcattgagctgtctcaggacctgatgagcgaagcggacattattctggccaccggtggtccgtctatggttaaggcagcgtactccagcggtaagcctgctatcggcgttggtgcgggcaatacgccggctatcatcgatgaaagcgcggatattgatatggcagttagctccatcattctgtccaaaacctacgacaatggtgttatctgtgcaagcgagcaaagcatcctggtgatgaatagcatttacgagaaggtcaaagaagagtttgttaagcgtggttcctatattctgaaccagaacgagattgcaaaaatcaaagaaacgatgtttaagaatggcgcgattaatgcagatattgttggtaagtccgcatacattatcgcgaagatggcgggtatcgaagtgccgcaaaccaccaaaatcttgatcggcgaagtgcagagcgtggagaagagcgaactgttcagccatgagaaactgagcccggttctggctatgtacaaagtgaaggactttgacgaagccctgaagaaagctgagcgtctgattgagctgggcggcagcggtcacacgagcagcctgtatatcgatagccaaaacaataaggacaaggtgaaagagttcggtctggcgatgaaaacctctcgcacgtttatcaacatgccgagcagccaaggtgcgagcggcgatctgtataacttcgcaatcgcgccttcttttacgctgggttgcggtacctggggcggtaattcggtgagccagaatgtcgagccgaagcacctgctgaacatcgtttcggtcgcggagcgccgtgagaagagacctggttcaaagtcccacagaaaatttacttcaaatacggctgcctgcgtttcgcgctgaaagaactgaaagacatgaacaaaaagcgtgcgttcattgttaccgacaaagacctgttcaaactgggttacgtgaacaaaatcaccaaagttctggatgaaattgacatcaagtactccatcttcactgatatcaaatccgacccaacgattgatagcgtgaaaaagggcgctaaagaaatgctgaactttgaaccggacaccatcatcagcatcggtggtggctctcctatggatgctgcgaaggtcatgcacctgctgtacgaatacccggaagcggaaatcgaaaacctggctatcaacttcatggacatccgcaaacgtatctgcaacttcccgaagctgggcactaaagctatttccgttgccatcccgactaccgcgggcactggttccgaagccacgccgttcgccgtgatcaccaacgatgaaaccggtatgaaatacccgctgacctcttacgaactgaccccgaacatggcaattatcgacaccgagctgatgctgaacatgccgcgcaagctgaccgctgctaccggcatcgacgctctggtacatgctattgaggcgtacgtttccgtgatggctaccgattacaccgacgaactggccctgcgtgcgatcaaaatgattttcaagtacctgcctcgcgcttacaaaaacggcacgaatgacatcgaggcgcgtgagaaaatggcccatgcaagcaacatcgcgggcatggccttcgccaacgcgttcctgggcgtgtgccactctatggctcacaaactgggtgctatgcaccacgtgccgcacggtatcgcgtgtgctgtcctgatcgaagaagtaattaagtacaacgctactgattgcccgactaaacagaccgccttcccacagtacaaatctcctaacgctaaacgtaagtacgctgagatcgccgaatacctgaacctgaagggtacgagcgacactgagaaagttactgcgctgatcgaagctatctctaaactgaaaattgacctgtccatcccgcagaacatcagcgccgcaggcatcaacaaaaaggacttttacaacacgctggacaaaatgagcgaactggcttttgacgaccagtgcaccactgcaaacccgcgttacccgctgatctctgagctgaaagacatttatatcaaatctttt

SEQ ID NO: 204 - DNA, 2573 bp, Artificial Sequence
  Synthetic Construct
atgaaagtgacgaaccaaaaagaactgaaacaaaaactgaatgaactgcgtgaggcccagaaaaagttcgctacgtatacccaggcgcaagttgacaagttcttcaaacagtgtgccattgcggctgccaaagagcgtattaacttggccaaactggcggtggaagaaaccggcatcggtctggtcgaggacaagattatcaagaatcactttgccgcggagtatatctacaacaaatacaaaaacgaaaagacttgcggcatcattgatcatgatgacagcttgggtatcacgaaagtcgcagaaccaatcggtattgtcgcggcaattgtcccgaccactaatccgaccagcaccgcgatcttcaagagcttgatcagcctgaaaacccgcaacgcgattttcttcagcccgcacccgcgtgcgaagaagagcaccatcgcagcggcgaagctgattttggatgccgcggttaaggccggtgcaccgaaaaacattattggctggattgacgagccgagcattgagctgtctcaggacctgatgagcgaagcggacattattctggccaccggtggtccgtctatggttaaggcagcgtactccagcggtaagcctgctatcggcgttggtgcgggcaatacgccggctatcatcgatgaaagcgcggatattgatatggcagttagctccatcattctgtccaaaacctacgacaatggtgttatctgtgcaagcgagcaaagcatcctggtgatgaatagcatttacgagaaggtcaaagaagagtttgttaagcgtggttcctatattctgaaccaggaggagattgcaaaaatcaaagaaacgatgtttaagaatggcgcgattaatgcagatattgttggtaagtccgcatacattatcgcgaagatggcgggtatcgaagtgccgcaattcaccaaaatcttgatcggcgaagtgcagagcgtggagaagagcgaactgttcagccatgagaaactgagcccggttctggctatgtacaaagtgaaggactttgacgaagccctgaagaaagctcagcgtctgattgagctgggcggcagcggtcacacgagcagcctgtatatcgatagccaaaacaataaggacaaggtgaaagagttcggtctggcgatgaaaacctctcgcacgtttatcaacatgccgagcagccaaggtgcgagcggcgatctgtataacttcgcaatcgcgccttcttttacgctgggttgcggtacctggggcggtaattcggtgagccagaatgtcgagccgaagcacctgctgaacatcaaatcggtcgcggagcgccgtgagaagagacctggttcaaagtcccacagaaaatttacttcaaatacggctgcctgcgtttcgcgctgaaagaactgaaagacatgaacaaaaagcgtgcgttcattgttaccgacaaagacctgttcaaactgggttacgtgaacaaaatcaccaaagttctggatgaaattgacatcaagtactccatcttcactgatatcaaatccgacccaacgattgatagcgtgaaaaagggcgctaaagaaatgctgaactttgaaccggacaccatcatcagcatcggtggtggctctcctatggatgctgcgaaggtcatgcacctgctgtacgaatacccggaagcggaaatcgaaaacctggctatcaacttcatggacatccgcaaacgtatctgcaacttcccgaagctgggcactaaagctatttccgttgccatcccgactaccgcgggcactggttccgaagccacgccgttcgccgtgatcaccaacgatgaaaccggtatgaaatacccgctgacctcttacgaactgaccccgaacatggcaattatcgacaccgagctgatgctgaacatgccgcgcaagctgaccgctgctaccggcatcgacgctctggtacatgctattgaggcgtacgtttccgtgatggctaccgattacaccgacgaactggccctgcgtgcgatcaaaatgattttcaagtacctgcctcgcgcttacaaaaacggcacgaatgacatcgaggcgcgtgagaaaatggcccatgcaagcaacatcgcgggcatggccttcgccaacgcgttcctgggcgtgtgccactctatggctcacaaactgggtgctatgcaccacgtgccgcacggtatcgcgtgtgctgtcctgatcgaagaagtaattaagtacaacgctactgattgcccgactaaacagaccgccttcccacagtacaaatctcctaacgctaaacgtaagtacgctgagatcgccgaatacctgaacctgaagggtacgagcgacactgagaaagttactgcgctgatcgaagctatctctaaactgaaaattgacctgtccatcccgcagaacatcagcgccgcaggcatcaacaaaaaggacttttacaacacgctggacaaaatgagcgaactggcttttgacgaccagtgcaccactgcaaacccgcgttacccgctgatctctgagctgaaagacatttatatcaaatctttt

SEQ ID NO: 205 - DNA, 2573 bp, Artificial Sequence
  Synthetic Construct
atgaaagtgacgaaccaaaaagaactgaaacaaaaactgaatgaactgcgtgaggcccagaaaaagttcgctacgtatacccaggagcaagttgagaagatcttcaaacagtgtgccattgcggctgccaaagagcgtattaacttggccaaactggcggtggaagaaaccggcatcggtctggtcgaggacaagattatcaagaatcactttgccgcggagtatatctacaacaaatacaaaaacgaaaagacttgcggcatcattgatcatgatgacagcttgggtatcacgaaagtcgcagaaccaatcggtattgtcgcggcaattgtcccgaccactaatccgaccagcaccgcgatcttcaagagcttgatcagcctgaaaacccgcaacgcgattttcttcagcccgcacccgcgtgcgaagaagagcaccatcgcagcggcgaagctgattttggatgccgcggttaaggccggtgcaccgaaaaacattattggctggattgacgagccgagcattgagctgtctcaggacctgatgagcgaagcggacattattctggccaccggtggtccgtctatggttaaggcagcgtactccagcggtaagcctgctatcggcgttggtgcgggcaatacgccggctatcatcgatgaaagcgcggatattgatatggcagttagctccatcattctgtccaaaacctacgacaatggtgttatctgtgcaagcgagcaaagcatcctggtgatgaatagcatttacgagaaggtcaaagaagagtttgttaagcgtggttcctatattctgaaccagcaggagattgcaaaaatcaaagaaacgatgtttaagaatggcgcgattaatgcagatattgttggtaagtccgcatacattatcgcgaagatggcgggtatcgaagtgccgcaaaccaccaaaatcttgatcggcgaagtgcaggacgtggagaagagcgaactgttcagccatgagaaactgagcccggttctggctatgtacaaagtgaaggactttgacgaagccctgaagaaagctcagcgtctgattgagctgggcggcagcggtcacacgagcagcctgtatatcgatagccaaaacaataaggacaaggtgaaagagttcggtctggagatgaaaacctctcgcacgtttatcaacatgccgagcagccaaggtgcgagcggcgatctgtataacttcgcaatcgcgccttcttttacgctgggttgcggtacctggggcggtaattcggtgagccagaatgtcgagccgaagcacctgctgaacatcaaatcggtcgcggagcgccgtgagaagagacctggttcaaagtcccacagaaaatttacttcaaatacggctgcctgcgtttcgcgctgaaagaactgaaagacatgaacaaaaagcgtgcgttcattgttaccgacaaagacctgttcaaactgggttacgtgaacaaaatcaccaaagttctggatgaaattgacatcaagtactccatcttcactgatatcaaatccgacccaacgattgatagcgtgaaaaagggcgctaaagaaatgctgaactttgaaccggacaccatcatcagcatcggtggtggctctcctatggatgctgcgaaggtcatgcacctgctgtacgaatacccggaagcggaaatcgaaaacctggctatcaacttcatggacatccgcaaacgtatctgcaacttcccgaagctgggcactaaagctatttccgttgccatcccgactaccgcgggcactggttccgaagccacgccgttcgccgtgatcaccaacgatgaaaccggtatgaaatacccgctgacctcttacgaactgaccccgaacatggcaattatcgacaccgagctgatgctgaacatgccgcgcaagctgaccgctgctaccggcatcgacgctctggtacatgctattgaggcgtacgtttccgtgatggctaccgattacaccgacgaactggccctgcgtgcgatcaaaatgattttcaagtacctgcctcgcgcttacaaaaacggcacgaatgacatcgaggcgcgtgagaaaatggcccatgcaagcaacatcgcgggcatggccttcgccaacgcgttcctgggcgtgtgccactctatggctcacaaactgggtgctatgcaccacgtgccgcacggtatcgcgtgtgctgtcctgatcgaagaagtaattaagtacaacgctactgattgcccgactaaacagaccgccttcccacagtacaaatctcctaacgctaaacgtaagtacgctgagatcgccgaatacctgaacctgaagggtacgagcgacactgagaaagttactgcgctgatcgaagctatctctaaactgaaaattgacctgtccatcccgcagaacatcagcgccgcaggcatcaacaaaaaggacttttacaacacgctggacaaaatgagcgaactggcttttgacgaccagtgcaccactgcaaacccgcgttacccgctgatctctgagctgaaagacatttatatcaaatctttt

SEQ ID NO: 206 - DNA, 2573 bp, Artificial Sequence
  Synthetic Construct
atgaaagtgacgaaccaaaaagaactgaaacaaaaactgaatgaactgcgtgaggcccagaaaaagttcaacacgtatacccaggagcaagttgacaagatcttcaaacagtgtgccattgcggctgccaaataccgtattaacttggccaaactggcggtggaagaaaccggcatcggtctggtcgaggacaagattatcaagaatcactttgccgcggagtatatctacaacaaatacaaaaacgaaaagacttgcggcatcattgatcatgatgacagcttgggtatcacgaaagtcgcagaaccaatcggtattgtcgcggcaattgtcccgaccactaatccgaccagcaccgcgatcttcaagagcttgatcagcctgaaaacccgcaacgcgattttcttcagcccgcacccgcgtgcgaagaagagcaccatcgcagcggcgaagctgattttggatgccgcggttaaggccggtgcaccgaaaaacattattggctggattgacgagccgagcattgagctgtctcaggacctgatgagcgaagcggacattattctggccaccggtggtccgtctatggttaaggcagcgtactccagcggtaagcctgctatcggcgttggtgcgggcaatacgccggctatcatcgatgaaagcgcggatattgatatggcagttagctccatcattctgtccaaaacctacgacaatggtgttatctgtgcaagcgagcaaagcatcctggtgatgaatagcatttacgagaaggtcaaagaagagtttgttaagcgtggttcctatattctgaaccagaacgcgattgcaaaaatcaaagaaacgatgtttaagaatggcgcgattaatgcagatattgttggtaagtccgcatacattatcgcgaagatggcgggtatcgaagtgccgcaaaccaccaaaatcttgatcggcgaagtgcagagcgtggagaagagcgaactgttcagccatgagaaactgagcccggttctggctatgtacaaagtgaaggactttgacgaagccctgaagaaagctcagcgtctgattgagctgggcggcagcggtcacacgagcagcctgtatatcgatagccaaaacaataaggacaaggtgaaagagttcggtctggcgatgaaaacctctcgcacgtttatcaacatgccgagcagccaaggtgcgagcggcgatctgtataacttcgcaatcgcgccttcttttacgctgggttgcccgacctggggcggtaattcggtgagccagaatgtcgagccgaagcacctgctgaacatcaaatcggtcgcggagcgccgtgagaagagacctggttcaaagtcccacagaaaatttacttcaaatacggctgcctgcgtttcgcgctgaaagaactgaaagacatgaacaaaaagcgtgcgttcattgttaccgacaaagacctgttcaaactgggttacgtgaacaaaatcaccaaagttctggatgaaattgacatcaagtactccatcttcactgatatcaaatccgacccaacgattgatagcgtgaaaaagggcgctaaagaaatgctgaactttgaaccggacaccatcatcagcatcggtggtggctctcctatggatgctgcgaaggtcatgcacctgctgtacgaatacccggaagcggaaatcgaaaacctggctatcaacttcatggacatccgcaaacgtatctgcaacttcccgaagctgggcactaaagctatttccgttgccatcccgactaccgcgggcactggttccgaagccacgccgttcgccgtgatcaccaacgatgaaaccggtatgaaatacccgctgacctcttacgaactgaccccgaacatggcaattatcgacaccgagctgatgctgaacatgccgcgcaagctgaccgctgctaccggcatcgacgctctggtacatgctattgaggcgtacgtttccgtgatggctaccgattacaccgacgaactggccctgcgtgcgatcaaaatgattttcaagtacctgcctcgcgcttacaaaaacggcacgaatgacatcgaggcgcgtgagaaaatggcccatgcaagcaacatcgcgggcatggccttcgccaacgcgttcctgggcgtgtgccactctatggctcacaaactgggtgctatgcaccacgtgccgcacggtatcgcgtgtgctgtcctgatcgaagaagtaattaagtacaacgctactgattgcccgactaaacagaccgccttcccacagtacaaatctcctaacgctaaacgtaagtacgctgagatcgccgaatacctgaacctgaagggtacgagcgacactgagaaagttactgcgctgatcgaagctatctctaaactgaaaattgacctgtccatcccgcagaacatcagcgccgcaggcatcaacaaaaaggacttttacaacacgctggacaaaatgagcgaactggcttttgacgaccagtgcaccactgcaaacccgcgttacccgctgatctctgagctgaaagacatttatatcaaatctttt

SEQ ID NO: 207 - DNA, 2573 bp, Artificial Sequence
  Synthetic Construct
atgaaagtgacgaaccaaaaagaactgaaacaaaaactgaatgaactgcgtgaggcccagaaaaagttcgctacgtatacccaggagcaagttgacaagatcttcaaacagtgtgccattgcggctgccaaagagcgtattaacttggccaaactggcggtggaagaaaccggcatcggtctggtcgaggacaagattatcaagaatcactttgccgcggagtatatctacaacaaatacaaaaacgaaaagacttgcggcatcattgatcatgatgacagcttgggtatcacgaaagtcgcagaaccaatcggtattgtcgcggcaattgtcccgaccactaatccgaccagcaccgcgatcttcaagagcttgatcagcctgaaaacccgcaacgcgattttcttcagcccgcacccgcgtgcgaagaagagcaccatcgcagcggcgaagctgattttggatgccgcggttaaggccggtgcaccgaaaaacattattggctggattgacgagccgagcattgagctgtctcaggacctgatgagcgaagcggacattattctggccaccggtggtccgtctatggttaaggcagcgtactccagcggtaagcctgctatcggcgcgggtgcgggcaatacgccggctatcatcgatgaaagcgcggatattgatatggcagttagctccatcattctgtccaaaacctacgacaatggtgttatctgtgcaagcgagcaaagcatcctggtgatgaatagcatttacgagaaggtcaaagaagagtttgttaagcgtggttcctatattctgaaccagcaggagattgcaaaaatcaaagaaacgatgtttaagaatggcgcgattaatgcagatattgttggtaagtccgcatacattatcgcgaagatggcgggtatcgaagtgccgcaaaccaccaaaatcttgatcggcgaagtgcagagcgtggagaagagcgaactgttcagcgaggagaaactgagcccggttctggctatgtacaaagtgaaggactttgacgaagccctgaagaaagctcagcgtctgattgagctgggcggcagcggtcacacgagcagcctgtatatcgatagccaaaacaataaggacaaggtgaaagagttcggtctggcgatgaaaacctctcgcacgtttatcaacatgccgagcagccaaggtgcgagcggcgatctgtataacttcgcaatcgcgccttcttttacgctgggttgcggtacctggggcggtaattcggtgagccagaatgtcgagccgaagcacctgctgaacatcaaatcggtcgcgcgtcgccgtgagaagagacctggttcaaagtcccacagaaaatttacttcaaatacggctgcctgcgtttcgcgctgaaagaactgaaagacatgaacaaaaagcgtgcgttcattgttaccgacaaagacctgttcaaactgggttacgtgaacaaaatcaccaaagttctggatgaaattgacatcaagtactccatcttcactgatatcaaatccgacccaacgattgatagcgtgaaaaagggcgctaaagaaatgctgaactttgaaccggacaccatcatcagcatcggtggtggctctcctatggatgctgcgaaggtcatgcacctgctgtacgaatacccggaagcggaaatcgaaaacctggctatcaacttcatggacatccgcaaacgtatctgcaacttcccgaagctgggcactaaagctatttccgttgccatcccgactaccgcgggcactggttccgaagccacgccgttcgccgtgatcaccaacgatgaaaccggtatgaaatacccgctgacctcttacgaactgaccccgaacatggcaattatcgacaccgagctgatgctgaacatgccgcgcaagctgaccgctgctaccggcatcgacgctctggtacatgctattgaggcgtacgtttccgtgatggctaccgattacaccgacgaactggccctgcgtgcgatcaaaatgattttcaagtacctgcctcgcgcttacaaaaacggcacgaatgacatcgaggcgcgtgagaaaatggcccatgcaagcaacatcgcgggcatggccttcgccaacgcgttcctgggcgtgtgccactctatggctcacaaactgggtgctatgcaccacgtgccgcacggtatcgcgtgtgctgtcctgatcgaagaagtaattaagtacaacgctactgattgcccgactaaacagaccgccttcccacagtacaaatctcctaacgctaaacgtaagtacgctgagatcgccgaatacctgaacctgaagggtacgagcgacactgagaaagttactgcgctgatcgaagctatctctaaactgaaaattgacctgtccatcccgcagaacatcagcgccgcaggcatcaacaaaaaggacttttacaacacgctggacaaaatgagcgaactggcttttgacgaccagtgcaccactgcaaacccgcgttacccgctgatctctgagctgaaagacatttatatcaaatctttt

SEQ ID NO: 208 - DNA, 2573 bp, Artificial Sequence
  Synthetic Construct
atgaaagtgacgaaccaaaaagaactgaaacaaaaactgaatgaactgcgtgaggcccagaaaaagttcgctacgtatacccaggagcaagttgacaagatcttcaaacagtgtgccattgcggctgccaaagagcgtattaacttggccaaactggcggtggaagaaaccggcatcggtctggtcgaggacaagattatcaagaatcactttgccgcggagtatatctacaacaaatacaaaaacgaaaagacttgcggcatcattgatcatgatgacagcttgggtatcacgaaagtcgcagaaccaatcggtattgtcgcggcaattgtcccgaccactaatccgaccagcaccgcgatcttcaagagcttgatcagcctgaaaacccgcaacgcgattttcttcagcccgcacccgcgtgcgaagaagagcaccatcgcagcggcgaccctgattttggatgccgcggttaaggccggtgcaccgaaaaacattattggctggattgacgagccgagcattgagctgtctcaggacctgatgagcgaagcggacattattctggccaccggtggtccgtctatggttaaggcagcgtactccagcggtaagcctgctatcggcgttggtgcgggcaatacgccggctatcatcgatgaaagcgcggatattgatatggcagttagctccatcattctgtccaaaacctacgacaatggtgttatctgtgcaagcgagcaaagcatcctggtgatgaatagcatttacgagaaggtcaaagcggagtttgttaagcgtggttcctatattctgaaccagaacgagattgcaaaaatcaaagaaacgatgtttaagaatggcgcgattaatgcagatattgttggtaagtccgcatacattatcgcgaagatggcgggtatcgaagtgccgcaaaccaccaaaatcttgatcggcgaagtgcagagcgtggagaagagcgaactgttcagcaaagagaaactgagcccggttctggctatgtacaaagtgaaggactttgacgaagccctgaagaaagctcagcgtctgattaacctgggcggcagcggtcacacgagcagcctgtatatcgatagccaaaacaataaggacaaggtgaaagagttcggtctggcgatgaaaacctctcgcacgtttatcaacatgccgagcagccaaggtgcgagcggcgatctgtataacttcgcaatcgcgccttcttttacgctgggttgcggtacctggggcggtaattcggtgagccagaatgtcgagccgaagcacctgctgaacatcaaatcggtcgcggagcgccgtgagaagagacctggttcaaagtcccacagaaaatttacttcaaatacggctgcctgcgtttcgcgctgaaagaactgaaagacatgaacaaaaagcgtgcgttcattgttaccgacaaagacctgttcaaactgggttacgtgaacaaaatcaccaaagttctggatgaaattgacatcaagtactccatcttcactgatatcaaatccgacccaacgattgatagcgtgaaaaagggcgctaaagaaatgctgaactttgaaccggacaccatcatcagcatcggtggtggctctcctatggatgctgcgaaggtcatgcacctgctgtacgaatacccggaagcggaaatcgaaaacctggctatcaacttcatggacatccgcaaacgtatctgcaacttcccgaagctgggcactaaagctatttccgttgccatcccgactaccgcgggcactggttccgaagccacgccgttcgccgtgatcaccaacgatgaaaccggtatgaaatacccgctgacctcttacgaactgaccccgaacatggcaattatcgacaccgagctgatgctgaacatgccgcgcaagctgaccgctgctaccggcatcgacgctctggtacatgctattgaggcgtacgtttccgtgatggctaccgattacaccgacgaactggccctgcgtgcgatcaaaatgattttcaagtacctgcctcgcgcttacaaaaacggcacgaatgacatcgaggcgcgtgagaaaatggcccatgcaagcaacatcgcgggcatggccttcgccaacgcgttcctgggcgtgtgccactctatggctcacaaactgggtgctatgcaccacgtgccgcacggtatcgcgtgtgctgtcctgatcgaagaagtaattaagtacaacgctactgattgcccgactaaacagaccgccttcccacagtacaaatctcctaacgctaaacgtaagtacgctgagatcgccgaatacctgaacctgaagggtacgagcgacactgagaaagttactgcgctgatcgaagctatctctaaactgaaaattgacctgtccatcccgcagaacatcagcgccgcaggcatcaacaaaaaggacttttacaacacgctggacaaaatgagcgaactggcttttgacgaccagtgcaccactgcaaacccgcgttacccgctgatctctgagctgaaagacatttatatcaaatctttt

SEQ ID NO: 209 - DNA, 2573 bp, Artificial Sequence
  Synthetic Construct
atgaaagtgacgaaccaaaaagaactgaaacaaaaactgaatgaactgcgtgaggcccagaaaaagttcgctacgtatacccaggagcaagttgacaagatcttcaaacagtgtgccattgcggctgccaaagagcgtattaacttggccaaactggcggtggaagaaaccggcatcggtctggtcgaggacaagattatcaagaatcactttgccgcggagtatatctacaacaaatacaaaaacgaaaagacttgcggcatcattgatcatgatgacagcttgggtatcacgaaagtcgcagaaccaatcggtattgtcgcggcaattgtcccgaccactaatccgaccagcaccgcgatcttcaagagcttgatcagcctgaaaacccgcaacgcgattttcttcagcccgcacccgcgtgcgaagaagagcaccatcgcagcggcgaagctgattttggatgccgcggttaaggccggtgcaccgaaaaacattattggctggattgacgagccgagcattgagctgtctcaggacctgatgagcgaagcggacattattctggccaccggtggtccgtctatggttaaggcagcgtactccagcggtaagcctgctatcggcgttggtgcgggcaatacgccggctatcatcgatgaaagcgcggatattgatatggcagttagctccatcattctgtccaaaacctacgacaatggtgttatctgtgcaagcgagcaaagcatcctggtgatgaatagcatttacgagaaggtcaaagaagagtttgttaagcgtggttcctatattctgaaccagaacgagattgcaaaaatcaaagaaacgatgtttaagaatggcgcgattaatcgtgatattgttggtaagtccgcatacattatcgcgaagatggcgggtatcgaagtgccgcaattcaccaaaatcttgatcggcgaagtgcaggacgtggagaagagcgaactgttcagccatgagaaactgagcccggttctggctatgtacaaagtgaaggactttgacgaagccctgaagaaagctcagcgtctgattgagctgggcggcagcggtcacacgagcagcctgtatatcgatagccaaaacaataaggacaaggtgaaagagttcggtctggcgatgaaaacctctcgcacgtttatcaacatgccgagcagccaaggtgcgagcggcgatctgtataacttcgcaatcgcgccttcttttacgctgggttgcggtacctggggcggtaattcggtgagccagaatgtcgagccgaagcacctgctgaacatcaaatcggtcgcgcgtcgccgtgagaagagacctggttcaaagtcccacagaaaatttacttcaaatacggctgcctgcgtttcgcgctgaaagaactgaaagacatgaacaaaaagcgtgcgttcattgttaccgacaaagacctgttcaaactgggttacgtgaacaaaatcaccaaagttctggatgaaattgacatcaagtactccatcttcactgatatcaaatccgacccaacgattgatagcgtgaaaaagggcgctaaagaaatgctgaactttgaaccggacaccatcatcagcatcggtggtggctctcctatggatgctgcgaaggtcatgcacctgctgtacgaatacccggaagcggaaatcgaaaacctggctatcaacttcatggacatccgcaaacgtatctgcaacttcccgaagctgggcactaaagctatttccgttgccatcccgactaccgcgggcactggttccgaagccacgccgttcgccgtgatcaccaacgatgaaaccggtatgaaatacccgctgacctcttacgaactgaccccgaacatggcaattatcgacaccgagctgatgctgaacatgccgcgcaagctgaccgctgctaccggcatcgacgctctggtacatgctattgaggcgtacgtttccgtgatggctaccgattacaccgacgaactggccctgcgtgcgatcaaaatgattttcaagtacctgcctcgcgcttacaaaaacggcacgaatgacatcgaggcgcgtgagaaaatggcccatgcaagcaacatcgcgggcatggccttcgccaacgcgttcctgggcgtgtgccactctatggctcacaaactgggtgctatgcaccacgtgccgcacggtatcgcgtgtgctgtcctgatcgaagaagtaattaagtacaacgctactgattgcccgactaaacagaccgccttcccacagtacaaatctcctaacgctaaacgtaagtacgctgagatcgccgaatacctgaacctgaagggtacgagcgacactgagaaagttactgcgctgatcgaagctatctctaaactgaaaattgacctgtccatcccgcagaacatcagcgccgcaggcatcaacaaaaaggacttttacaacacgctggacaaaatgagcgaactggcttttgacgaccagtgcaccactgcaaacccgcgttacccgctgatctctgagctgaaagacatttatatcaaatctttt

SEQ ID NO: 210 - DNA, 2573 bp, Artificial Sequence
  Synthetic Construct
atgaaagtgacgaaccaaaaagaactgaaacaaaaactgaatgaactgcgtgaggcccagaaaaagttcgctacgatgacccaggagcaagttgacaagatcttcaaacagtgtgccattgcggctgccaaagagcgtattaacttggccaaactggcggtggaagaaaccggcatcggtctggtcgaggacaagattatcaagaatcactttgccgcggagtatatctacaacaaatacaaaaacgaaaagacttgcggcatcattgatcatgatgacagcttgggtatcacgaaagtcgcagaaccaatcggtattgtcgcggcaattgtcccgaccactaatccgaccagcaccgcgatcttcaagagcttgatcagcctgaaaacccgcaacgcgattttcttcagcccgcacccgcgtgcgaagaagagcaccatcgcagcggcgaagctgattttggatgccgcggttaaggccggtgcaccgaaaaacattattggctggattgacgagccgagcattgagctgtctcaggacctgatgagcgaagcggacattattctggccaccggtggtccgtctatggttaaggcagcgtactccagcggtaagcctgctatcggcgttggtgcgggcaatacgccggctatcatcgatgaaagcgcggatattgatatggcagttagctccatcattctgtccaaaacctacgacaataacgttatctgtgcaagcgagcaaagcatcctggtgatgaatagcatttacgagaaggtcaaagaagagtttgttaagcgtggttcctatattctgaaccagaacgagattgcaaaaatcaaagaaacgatgtttaagaatggcgcgattaatcgtgatattgttggtaagtccgcatacattatcgcgaagatggcgggtatcgaagtgccgcaaaccaccaaaatcttgatcggcgaagtgcagagcgtggagaagagcgaactgttcagcgttgagaaactgagcccggttctggctatgtacaaagtgaaggactttgacgaagccctgaagaaagctcagcgtctgattgagctgggcggcagcggtcacacgagcagcctgtatatcgatagccaaaacaataaggacaaggtgaaagagttcggtctggcgatgaaaacctctcgcacgtttatcaacatgccgagcagccaaggtgcgagcggcgatctgtataacttcgcaatcgcgccttcttttacgctgggttgcggtacctggggcggtaattcggtgagccagaatgtcgagccgaagcacctgctgaacatcaaatcggtcgcggagcgccgtgagaagagacctggttcaaagtcccacagaaaatttacttcaaatacggctgcctgcgtttcgcgctgaaagaactgaaagacatgaacaaaaagcgtgcgttcattgttaccgacaaagacctgttcaaactgggttacgtgaacaaaatcaccaaagttctggatgaaattgacatcaagtactccatcttcactgatatcaaatccgacccaacgattgatagcgtgaaaaagggcgctaaagaaatgctgaactttgaaccggacaccatcatcagcatcggtggtggctctcctatggatgctgcgaaggtcatgcacctgctgtacgaatacccggaagcggaaatcgaaaacctggctatcaacttcatggacatccgcaaacgtatctgcaacttcccgaagctgggcactaaagctatttccgttgccatcccgactaccgcgggcactggttccgaagccacgccgttcgccgtgatcaccaacgatgaaaccggtatgaaatacccgctgacctcttacgaactgaccccgaacatggcaattatcgacaccgagctgatgctgaacatgccgcgcaagctgaccgctgctaccggcatcgacgctctggtacatgctattgaggcgtacgtttccgtgatggctaccgattacaccgacgaactggccctgcgtgcgatcaaaatgattttcaagtacctgcctcgcgcttacaaaaacggcacgaatgacatcgaggcgcgtgagaaaatggcccatgcaagcaacatcgcgggcatggccttcgccaacgcgttcctgggcgtgtgccactctatggctcacaaactgggtgctatgcaccacgtgccgcacggtatcgcgtgtgctgtcctgatcgaagaagtaattaagtacaacgctactgattgcccgactaaacagaccgccttcccacagtacaaatctcctaacgctaaacgtaagtacgctgagatcgccgaatacctgaacctgaagggtacgagcgacactgagaaagttactgcgctgatcgaagctatctctaaactgaaaattgacctgtccatcccgcagaacatcagcgccgcaggcatcaacaaaaaggacttttacaacacgctggacaaaatgagcgaactggcttttgacgaccagtgcaccactgcaaacccgcgttacccgctgatctctgagctgaaagacatttatatcaaatctttt

SEQ ID NO: 211 - DNA, 2573 bp, Artificial Sequence
  Synthetic Construct
atgaaagtgacgaaccaaaaagaactgaaacaaaaactgaatgaactgcgtgaggcccagaaaaagttcgctacgtatacccaggagcaagttgacaagatcttcaaacagtgtgccattgcggctgccaaagagcgtattaacttggccaaactggcggtggaagaaaccggcatcggtctggtcgaggacaagattatcaagaatcactttgccgcggagtatatctacaacaaatacaaaaacgaaaagacttgcggcatcattgatcatgatgacagcttgggtatcacgaaagtcgcagaaccaatcggtattgtcgcgagcattgtcccgaccactaatccgaccagcaccgcgatcttcaagagcttgatcagcctgaaaacccgcaacgcgattttcttcagcccgcacccgcgtgcgaagaagagcaccatcgcagcggcgaagctgattttggatgccgcggttaaggccggtgcaccgaaaaacattattggctggattgacgagccgagcattgagctgtctcaggacatgatgagcgaagcggacattattctggccaccggtggtccgtctatggttaaggcagcgtactccagcggtaagcctgctatcggcgttggtgcgggcaatacgccggctatcatcgatgaaagcgcggatattgatatggcagttagctccatcattctgtccaaaacctacgacaatggtgttatctgtgcaagcgagcaaagcatcctggtgatgaatagcatttacgagaaggtcaaaaaagagtttgttaagcgtggttcctatattctgaaccagaacgagattgcaaaaatcaaagaaacgatgtttaagaatggcgcgattaatgcagatattgttggtaagtccgcatacattatcgcgaagatggcgggtatcgaagtgccgcaaaccaccaaaatcttgatcggcgaagtgcagagcgtggagaagagcgaactgttcagccatgagaaactgagcccggttctggctatgtacaaagtgaaggactttgacgaagccctgaagaaagctcagcgtctgattgagctgggcggcagccaccacacgagcagcctgtatatcgatagccaaaacaataaggacaaggtgaaagagttcggtctggcgatgaaaacctctcgcacgtttatcaacatgccgagcagccaaggtgcgagcggcgatctgtataacttcgcaatcgcgccttcttttacgctgggttgcggtacctggggcggtaattcggtgagccagaatgtcgagccgaagcacctgctgaacatcaaatcggtcgcggagcgccgtgagaagagacctggttcaaagtcccacagaaaatttacttcaaatacggctgcctgcgtttcgcgctgaaagaactgaaagacatgaacaaaaagcgtgcgttcattgttaccgacaaagacctgttcaaactgggttacgtgaacaaaatcaccaaagttctggatgaaattgacatcaagtactccatcttcactgatatcaaatccgacccaacgattgatagcgtgaaaaagggcgctaaagaaatgctgaactttgaaccggacaccatcatcagcatcggtggtggctctcctatggatgctgcgaaggtcatgcacctgctgtacgaatacccggaagcggaaatcgaaaacctggctatcaacttcatggacatccgcaaacgtatctgcaacttcccgaagctgggcactaaagctatttccgttgccatcccgactaccgcgggcactggttccgaagccacgccgttcgccgtgatcaccaacgatgaaaccggtatgaaatacccgctgacctcttacgaactgaccccgaacatggcaattatcgacaccgagctgatgctgaacatgccgcgcaagctgaccgctgctaccggcatcgacgctctggtacatgctattgaggcgtacgtttccgtgatggctaccgattacaccgacgaactggccctgcgtgcgatcaaaatgattttcaagtacctgcctcgcgcttacaaaaacggcacgaatgacatcgaggcgcgtgagaaaatggcccatgcaagcaacatcgcgggcatggccttcgccaacgcgttcctgggcgtgtgccactctatggctcacaaactgggtgctatgcaccacgtgccgcacggtatcgcgtgtgctgtcctgatcgaagaagtaattaagtacaacgctactgattgcccgactaaacagaccgccttcccacagtacaaatctcctaacgctaaacgtaagtacgctgagatcgccgaatacctgaacctgaagggtacgagcgacactgagaaagttactgcgctgatcgaagctatctctaaactgaaaattgacctgtccatcccgcagaacatcagcgccgcaggcatcaacaaaaaggacttttacaacacgctggacaaaatgagcgaactggcttttgacgaccagtgcaccactgcaaacccgcgttacccgctgatctctgagctgaaagacatttatatcaaatctttt

SEQ ID NO: 212 - DNA, 2573 bp, Artificial Sequence
  Synthetic Construct
atgaaagtgacgaaccaaaaagaactgaaacaaaaactgaatgaactgcgtgaggcccagaaaaagttcgctacgtatacccaggagcaagttgacaagatcttcaaacagtgtgccattgcggctgccaaagagcgtattaacttggccaaactggcggtggaagaaaccggcatcggtctggtcgaggacaagattatcaagaatcactttgccgcggagtatatctacaacaaatacaaaaacgaaaagacttgcggcatcattgatcatgatgacagcttgggtatcacgaaagtcgcagaaccaatcggtattgtcgcggcaattgtcccgaccactaatccgaccagcaccgcgatcttcaagagcttgatcagcctgaaaacccgcaacgcgattttcttcagcccgcacccgcgtgcgaagaagagcaccatcgcagcggcgaagctgattttggatgccgcggttaaggccggtgcaccgaaaaacattattggctggattgacgagccgagcattgagctgtctcaggacctgatgagcgaagcggacattattctggccaccggtggtccgtctatggttaaggcagcgtactccagcggtaagcctgctatcggcgttggtgcgggcaatacgccggctatcatcgatgaaagcgcggatattgatatggcagttagctccatcattctgtccgcgacctacgacaatggtgttatctgtgcaagcgagcaaagcatcctggtgatgaatagcatttacgagaaggtcaaagaagagtttgttaagcgtggttcctatattctgaaccagaacgagattgcaaaaatcaaagaaacgatgtttaagaatggcgcgattaatgcagatattgttggtaagtccgcatacattatcgcgaagatggcgggtatcgaagtgccgcaaaccaccaaaatcttgatcggcgaagtgcagagcgtggaggcgagcgaactgttcagcaaagagaaactgagcccggttctggctatgtacaaagtgaaggactttgacgaagccctgaagctggctcagcgtctgattgagctgggcggcagcggtcacacgagcagcctgtatatcgatagccaaaacaataaggacaaggtgaaagagttcggtctggcgatgaaaacctctcgcacgtttatcaacatgccgagcagccaaggtgcgagcggcgatctgtataacttcgcaatcgcgccttcttttacgctgggttgcggtacctggggcggtaattcggtgagccagaatgtcgagccgaagcacctgctgaacatcaaatcggtcgcggagcgccgtgagaagagacctggttcaaagtcccacagaaaatttacttcaaatacggctgcctgcgtttcgcgctgaaagaactgaaagacatgaacaaaaagcgtgcgttcattgttaccgacaaagacctgttcaaactgggttacgtgaacaaaatcaccaaagttctggatgaaattgacatcaagtactccatcttcactgatatcaaatccgacccaacgattgatagcgtgaaaaagggcgctaaagaaatgctgaactttgaaccggacaccatcatcagcatcggtggtggctctcctatggatgctgcgaaggtcatgcacctgctgtacgaatacccggaagcggaaatcgaaaacctggctatcaacttcatggacatccgcaaacgtatctgcaacttcccgaagctgggcactaaagctatttccgttgccatcccgactaccgcgggcactggttccgaagccacgccgttcgccgtgatcaccaacgatgaaaccggtatgaaatacccgctgacctcttacgaactgaccccgaacatggcaattatcgacaccgagctgatgctgaacatgccgcgcaagctgaccgctgctaccggcatcgacgctctggtacatgctattgaggcgtacgtttccgtgatggctaccgattacaccgacgaactggccctgcgtgcgatcaaaatgattttcaagtacctgcctcgcgcttacaaaaacggcacgaatgacatcgaggcgcgtgagaaaatggcccatgcaagcaacatcgcgggcatggccttcgccaacgcgttcctgggcgtgtgccactctatggctcacaaactgggtgctatgcaccacgtgccgcacggtatcgcgtgtgctgtcctgatcgaagaagtaattaagtacaacgctactgattgcccgactaaacagaccgccttcccacagtacaaatctcctaacgctaaacgtaagtacgctgagatcgccgaatacctgaacctgaagggtacgagcgacactgagaaagttactgcgctgatcgaagctatctctaaactgaaaattgacctgtccatcccgcagaacatcagcgccgcaggcatcaacaaaaaggacttttacaacacgctggacaaaatgagcgaactggcttttgacgaccagtgcaccactgcaaacccgcgttacccgctgatctctgagctgaaagacatttatatcaaatctttt

SEQ ID NO: 213 - DNA, 2573 bp, Artificial Sequence
  Synthetic Construct
atgaaagtgacgaaccaaaaagaactgaaacaaaaactgaatgaactgcgtgaggcccagaaaaagttcgctacgtatacccaggagcaagttgacaagatcttcaaacagtgtgccattgcggctgccaaagagcgtattaacttggccaaactggcggtggaagaaaccggcatcggtctggtcgaggacaagattatcaagaatcactttgccgcggagtatatctacaacaaatacaaaaacgaaaagacttgcggcatcattgatcatgatgacagcttgggtatcacgaaagtcgcagaaccaatcggtattgtcgcggcaattgtcccgaccactaatccgaccagcaccgcgatcttcaagagcttgatcagcctgaaaacccgcaacgcgattttcttcagcccgcacccgcgtgcgaagaagagcaccatcgcagcggcgaagctgattttggatgccgcggttaaggccggtgcaccgaaaaacattattggctggattgacgagccgagcattgagctgtctcaggacctgatgagcgaagcggacattattctggccaccggtggtccgtctatggttaaggcagcgtactccagcggtaagcctgctatcggcgttggtgcgggcaatacgccggctatcatcgatgaaagcgcggatattgatatggcagttagctccatcattctgtccaaaacctacgacaatggtgttatctgtgcaagcgagcaaagcatcctggtgatgaatagcatttacgagaaggtcaaagaagagtttgttaagcgtggttcctatattctgaaccagaacgagattgcaaaaatcaaagaaacgatgtttaagaatggcgcgattaatgcagatattgttggtaagtccgcatacattatcgcgaagatggcgggtatcgaagtgccgcaaaccaccaaaatcttgatcggcgaagtgcagagcgtggaggcgagcgaactgttcagccatgagaaactgagcccggttctggctatgtacaaagtgaaggactttgacgaagccctgaagaaagctcagcgtctgattaacctgggcggcagccaccacacgagcagcctgtatatcgatagccaaaacaataaggacaaggtgaaagagttcggtctggcgatgaaaacctctcgcacgtttatcaacatgccgagcagccaaggtgcgagcggcgatctgtataacttcgcaatcgcgccttcttttacgctgggttgcggtacctggggcggtaattcggtgagccagaatgtcgagccgaagcacctgctgaacatcgtttcggtcgcggagcgccgtgagaagagacctggttcaaagtcccacagaaaatttacttcaaatacggctgcctgcgtttcgcgctgaaagaactgaaagacatgaacaaaaagcgtgcgttcattgttaccgacaaagacctgttcaaactgggttacgtgaacaaaatcaccaaagttctggatgaaattgacatcaagtactccatcttcactgatatcaaatccgacccaacgattgatagcgtgaaaaagggcgctaaagaaatgctgaactttgaaccggacaccatcatcagcatcggtggtggctctcctatggatgctgcgaaggtcatgcacctgctgtacgaatacccggaagcggaaatcgaaaacctggctatcaacttcatggacatccgcaaacgtatctgcaacttcccgaagctgggcactaaagctatttccgttgccatcccgactaccgcgggcactggttccgaagccacgccgttcgccgtgatcaccaacgatgaaaccggtatgaaatacccgctgacctcttacgaactgaccccgaacatggcaattatcgacaccgagctgatgctgaacatgccgcgcaagctgaccgctgctaccggcatcgacgctctggtacatgctattgaggcgtacgtttccgtgatggctaccgattacaccgacgaactggccctgcgtgcgatcaaaatgattttcaagtacctgcctcgcgcttacaaaaacggcacgaatgacatcgaggcgcgtgagaaaatggcccatgcaagcaacatcgcgggcatggccttcgccaacgcgttcctgggcgtgtgccactctatggctcacaaactgggtgctatgcaccacgtgccgcacggtatcgcgtgtgctgtcctgatcgaagaagtaattaagtacaacgctactgattgcccgactaaacagaccgccttcccacagtacaaatctcctaacgctaaacgtaagtacgctgagatcgccgaatacctgaacctgaagggtacgagcgacactgagaaagttactgcgctgatcgaagctatctctaaactgaaaattgacctgtccatcccgcagaacatcagcgccgcaggcatcaacaaaaaggacttttacaacacgctggacaaaatgagcgaactggcttttgacgaccagtgcaccactgcaaacccgcgttacccgctgatctctgagctgaaagacatttatatcaaatctttt

SEQ ID NO: 214 - DNA, 2573 bp, Artificial Sequence
  Synthetic Construct
atgaaagtgacgaaccaaaaagaactgaaacaaaaactgaatgaactgcgtgaggcccagaaaaagttcgctagctatacccaggagcaagttgacaagatcttcaaacagtgtgccattgcggctgccaaagagcgtattaacttggccaaactggcggtggaagaaaccggcatcggtctggtcgaggacaagattatcaagaatcactttgccgcggagtatatctacaacaaatacaaaaacgaaaagacttgcggcatcattgatcatgatgacagcttgggtatcacgaaagtcgcagaaccaatcggtattgtcgcggcaattgtcccgaccactaatccgaccagcaccgcgatcttcaagagcttgatcagcctgaaaacccgcaacgcgattttcttcagcccgcacccgcgtgcgaagaagagcaccatcgcagcggcgaagctgattttggatgccgcggttaaggccggtgcaccgaaaaacattattggctggattgacgagccgagcattgagctgtctcaggacctgatgagcgaagcggacattattctggccaccggtggtccgtctatggttaaggcagcgtactccagcggtaagaaagctatcggcgttggtgcgggcaatacgccggctatcatcgatgaaagcgcggatattgatatggcagttagctccatcattctgtccaaaacctacgacaatggtgttatctgtgcaagcgagcaaagcatcctggtgatgaatagcatttacgagaaggtcaaagaagagtttgttaagcgtggttcctatattctgaaccagaacgagattgcaaaaatcaaagaaacgatgtttaagaatggcgcgattaatgcagatattgttggtaagtccgcatacattatcgcgaagatggcgggtatcgaagtgccgcaatacaccaaaatcttgatcggcgaagtgcagagcgtggagaagagcgaactgttcagccatgagaaactgagcccggttctggctatgtacaaagtgaaggactttgacgaagccctgaagaaagctcagcgtctgattgagctgggcggcagcggtcacacgagcagcctgtatatcgatagccaaaacaataaggacaaggtgaaagagttcggtctggcgatgaaaacctctcgcttctttatcaacatgccgagcagccaaggtgcgagcggcgatctgtataacttcgcaatcgcgccttcttttacgctgggttgcggtacctggggcggtaattcggtgagccagaatgtcgagccgaagcacctgctgaacatcaaatcggtcgcggagcgccgtgagaagagacctggttcaaagtcccacagaaaatttacttcaaatacggctgcctgcgtttcgcgctgaaagaactgaaagacatgaacaaaaagcgtgcgttcattgttaccgacaaagacctgttcaaactgggttacgtgaacaaaatcaccaaagttctggatgaaattgacatcaagtactccatcttcactgatatcaaatccgacccaacgattgatagcgtgaaaaagggcgctaaagaaatgctgaactttgaaccggacaccatcatcagcatcggtggtggctctcctatggatgctgcgaaggtcatgcacctgctgtacgaatacccggaagcggaaatcgaaaacctggctatcaacttcatggacatccgcaaacgtatctgcaacttcccgaagctgggcactaaagctatttccgttgccatcccgactaccgcgggcactggttccgaagccacgccgttcgccgtgatcaccaacgatgaaaccggtatgaaatacccgctgacctcttacgaactgaccccgaacatggcaattatcgacaccgagctgatgctgaacatgccgcgcaagctgaccgctgctaccggcatcgacgctctggtacatgctattgaggcgtacgtttccgtgatggctaccgattacaccgacgaactggccctgcgtgcgatcaaaatgattttcaagtacctgcctcgcgcttacaaaaacggcacgaatgacatcgaggcgcgtgagaaaatggcccatgcaagcaacatcgcgggcatggccttcgccaacgcgttcctgggcgtgtgccactctatggctcacaaactgggtgctatgcaccacgtgccgcacggtatcgcgtgtgctgtcctgatcgaagaagtaattaagtacaacgctactgattgcccgactaaacagaccgccttcccacagtacaaatctcctaacgctaaacgtaagtacgctgagatcgccgaatacctgaacctgaagggtacgagcgacactgagaaagttactgcgctgatcgaagctatctctaaactgaaaattgacctgtccatcccgcagaacatcagcgccgcaggcatcaacaaaaaggacttttacaacacgctggacaaaatgagcgaactggcttttgacgaccagtgcaccactgcaaacccgcgttacccgctgatctctgagctgaaagacatttatatcaaatctttt

SEQ ID NO: 215 - DNA, 2573 bp, Artificial Sequence
  Synthetic Construct
atgaaagtgacgaaccaaaaagaactgaaacaaaaactgaatgaactgcgtgaggcccagaaaaagttcgctacgtatacccaggagcaagttgacaagatcttcaaacagtgtgccattgcggctgccaaagagcgtattaacttggccaaactggcggtggaagaaaccggcatcggtctggtcgaggacaagattatcaagaatcactttgccgcggagtatatctacaacaaatacaaaaacgaaaagacttgcggcatcattgatcatgatgacagcttgggtatcacgaaagtcgcagaaccaatcggtattgtcgcggcaattgtcccgaccactaatccgaccagcaccgcgatcttcaagagcttgatcagcctgaaaacccgcaacgcgattttcttcagcccgcacccgcgtgcgaagaagagcaccatcgcagcggcgaagctgattttggatgccgcggttaaggccggtgcaccgaaaaacattattggctggattgacgagccgagcattgagctgtctcaggacctgatgagcgaagcggacattattctggccaccggtggtccgtctatggttaaggcagcgtactccagcggtaagcctgctatcggcgttggtgcgggcaatacgccggctatcatcgatgaaagcgcggatattgatatggcagttagctccatcattctgtccaaaacctacgacaatggtgttatctgtgcaagcgagcaaagcatcctggtgatgaatagcatttacgagaaggtcaaagaagagtttgttaagcgtggttcctatattctgaaccagaacgagattgcaaaaatcaaagaaacgatgtttaagaatggcgcgattaatgcagatattgttggtaagtccgcatacattatcgcgaagatggcgggtatcgaagtgccgcaatacaccaaaatcttgatcggcgaagtgcagagcgtggagaagagcgaactgttcagcgttgagaaactgagcccggttctggctatgtacaaagtgaaggactttgacgaagccctgaagctggctcagcgtctgattcacctgggcggcagcggtcacacgagcagcctgtatatcgatagccaaaacaataaggacaaggtgaaagagttcggtctggcgatgaaaacctctcgcacgtttatcaacatgccgagcagccaaggtgcgagcggcgatctgtataacttcgcaatcgcgccttcttttacgctgggttgcggtacctggggcggtaattcggtgagccagaatgtcgagccgaagcacctgctgaacatcaaatcggtcgcggagcgccgtgagaagagacctggttcaaagtcccacagaaaatttacttcaaatacggctgcctgcgtttcgcgctgaaagaactgaaagacatgaacaaaaagcgtgcgttcattgttaccgacaaagacctgttcaaactgggttacgtgaacaaaatcaccaaagttctggatgaaattgacatcaagtactccatcttcactgatatcaaatccgacccaacgattgatagcgtgaaaaagggcgctaaagaaatgctgaactttgaaccggacaccatcatcagcatcggtggtggctctcctatggatgctgcgaaggtcatgcacctgctgtacgaatacccggaagcggaaatcgaaaacctggctatcaacttcatggacatccgcaaacgtatctgcaacttcccgaagctgggcactaaagctatttccgttgccatcccgactaccgcgggcactggttccgaagccacgccgttcgccgtgatcaccaacgatgaaaccggtatgaaatacccgctgacctcttacgaactgaccccgaacatggcaattatcgacaccgagctgatgctgaacatgccgcgcaagctgaccgctgctaccggcatcgacgctctggtacatgctattgaggcgtacgtttccgtgatggctaccgattacaccgacgaactggccctgcgtgcgatcaaaatgattttcaagtacctgcctcgcgcttacaaaaacggcacgaatgacatcgaggcgcgtgagaaaatggcccatgcaagcaacatcgcgggcatggccttcgccaacgcgttcctgggcgtgtgccactctatggctcacaaactgggtgctatgcaccacgtgccgcacggtatcgcgtgtgctgtcctgatcgaagaagtaattaagtacaacgctactgattgcccgactaaacagaccgccttcccacagtacaaatctcctaacgctaaacgtaagtacgctgagatcgccgaatacctgaacctgaagggtacgagcgacactgagaaagttactgcgctgatcgaagctatctctaaactgaaaattgacctgtccatcccgcagaacatcagcgccgcaggcatcaacaaaaaggacttttacaacacgctggacaaaatgagcgaactggcttttgacgaccagtgcaccactgcaaacccgcgttacccgctgatctctgagctgaaagacatttatatcaaatctttt

SEQ ID NO: 216 - DNA, 2573 bp, Artificial Sequence
  Synthetic Construct
atgaaagtgacgaaccaaaaagaactgaaacaaaaactgaatgaactgcgtgaggcccagaaaaagttcgctacgtgcacccaggagcaagttgacaagatcttcaaacagtgtgccattgcggctgccaaagagcgtattaacttggccaaactggcggtggaagaaaccggcatcggtctggtcgaggacaagattatcaagaatcactttgccgcggagtatatctacaacaaagagaaaaacgaaaagacttgcggcatcattgatcatgatgacagcttgggtatcacgaaagtcgcagaaccaatcggtattgtcgcggcaattgtcccgaccactaatccgaccagcaccgcgatcttcaagagcttgatcagcctgaaaacccgcaacgcgattttcttcagcccgcacccgcgtgcgaagaagagcaccatcgcagcggcgaagctgattttggatgccgcggttaaggccggtgcaccgaaaaacattattggctggattgacgagccgagcattgagctgtctcaggacctgatgagcgaagcggacattattctggccaccggtggtccgtctatggttaaggcagcgtactccagcggtaagcctgctatcggcgttggtgcgggcaatacgccggctatcatcgatgaaagcgcggatattgatatggcagttagctccatcattctgtccaaaacctacgacaatggtgttatctgtgcaagcgagcaaagcatcctggtgatgaatagcatttacgagaaggtcaaagaagagtttgttaagcgtggttcctatattctgaaccagaacgagattgcaaaaatcaaagaaacgatgtttaagaatggcgcgattaatgcagatattgttggtaagtccgcatacattatcgcgaagatggcgggtatcgaagtgccgcaaaccaccaaaatcttgatcggcgaagtgcagagcgtggagaagagcgaactgttcagccatgagaaactgagcccggttctggctatgtacaaagtgaaggactttgacgaagccctggacaaagctcagcgtctgattgagctgggcggcagcggtcacacgagcagcctgtatatcgatagccaaaacaataaggacaaggtgaaagagttcggtctgcgtatgaaaacctctcgcacgtttatcaacatgccgagcagccaaggtgcgagcggcgatctgtataacttcgcaatcgcgccttcttttacgctgggttgcggtacctggggcggtaattcggtgagccagaatgtcgagccgaagcacctgctgaacatcaaatcggtcgcggagcgccgtgagaagagacctggttcaaagtcccacagaaaatttacttcaaatacggctgcctgcgtttcgcgctgaaagaactgaaagacatgaacaaaaagcgtgcgttcattgttaccgacaaagacctgttcaaactgggttacgtgaacaaaatcaccaaagttctggatgaaattgacatcaagtactccatcttcactgatatcaaatccgacccaacgattgatagcgtgaaaaagggcgctaaagaaatgctgaactttgaaccggacaccatcatcagcatcggtggtggctctcctatggatgctgcgaaggtcatgcacctgctgtacgaatacccggaagcggaaatcgaaaacctggctatcaacttcatggacatccgcaaacgtatctgcaacttcccgaagctgggcactaaagctatttccgttgccatcccgactaccgcgggcactggttccgaagccacgccgttcgccgtgatcaccaacgatgaaaccggtatgaaatacccgctgacctcttacgaactgaccccgaacatggcaattatcgacaccgagctgatgctgaacatgccgcgcaagctgaccgctgctaccggcatcgacgctctggtacatgctattgaggcgtacgtttccgtgatggctaccgattacaccgacgaactggccctgcgtgcgatcaaaatgattttcaagtacctgcctcgcgcttacaaaaacggcacgaatgacatcgaggcgcgtgagaaaatggcccatgcaagcaacatcgcgggcatggccttcgccaacgcgttcctgggcgtgtgccactctatggctcacaaactgggtgctatgcaccacgtgccgcacggtatcgcgtgtgctgtcctgatcgaagaagtaattaagtacaacgctactgattgcccgactaaacagaccgccttcccacagtacaaatctcctaacgctaaacgtaagtacgctgagatcgccgaatacctgaacctgaagggtacgagcgacactgagaaagttactgcgctgatcgaagctatctctaaactgaaaattgacctgtccatcccgcagaacatcagcgccgcaggcatcaacaaaaaggacttttacaacacgctggacaaaatgagcgaactggcttttgacgaccagtgcaccactgcaaacccgcgttacccgctgatctctgagctgaaagacatttatatcaaatctttt

SEQ ID NO: 217 - DNA, 2573 bp, Artificial Sequence
  Synthetic Construct
atgaaagtgacgaaccaaaaagaactgaaacaaaaactgaatgaactgcgtgaggcccagaaaaagttcgctacgtatacccaggagcaagttgacaagatcttcaaacagtgtgccattgcggctgccaaactgcgtattaacttggccaaactggcggtggaagaaaccggcatcggtctggtcgaggacaagattatcaagaatcactttgccgcggagtatatctacaacaaatacaaaaacgaaaagacttgcggcatcattgatcatgatgacagcttgggtatcacgaaagtcgcagaaccaatcggtattgtcgcggcaattgtcccgaccactaatccgaccagcaccgcgatcttcaagagcttgatcagcctgaaaacccgcaacgcgattttcttcagcccgcacccgcgtgcgaagaagagcaccatcgcagcggcgaagctgattttggatgccgcggttaaggccggtgcaccgaaaaacattattggctggattgacgagccgagcattgagctgtctcaggacctgatgagcgaagcggacattattctggccaccggtggtccgtctatggttaaggcagcgtactccagcggtaagcctgctatcggcgttggtgcgggcaatacgccggctatcatcgatgaaagcgcggatattgatatggcagttagctccatcattctgtccaaaacctacgacaatggtgttatctgtgcaagcgagcaaagcatcctggtgatgaatagcatttacgagaaggtcaaagaagagtttgttaagcgtggttcctatattctgaaccagaacgagattgcaaaaatcaaagaaacgatgtttaagaatggcgcgattaatgcagatattgttggtaagtccgcatacattatcgcgaagatggcgggtatcgaagtgccgcaaaccaccaaaatcttgatcggcgaagtgcagagcgtggagaagagcgaactgttcagccatgagaaactgagcccggttctggctatgtacaaagtgaaggactttgacgaagccctgaagaaagctgagcgtctgattgagctgggcggcagcggtcacacgagcagcctgtatatcgatagccaaaacaataaggacaaggtgaaagagttcggtctgcgtatgaaaacctctcgcacgtttatcaacatgccgagcagccaaggtgcgagcggcgatctgtataacttcgcaatcgcgccttcttttacgctggcgtgcggtacctggggcggtaattcggtgagccagaatgtcgagccgaagcacctgctgaacatcaaatcggtcgcggagcgccgtgagaagagacctggttcaaagtcccacagaaaatttacttcaaatacggctgcctgcgtttcgcgctgaaagaactgaaagacatgaacaaaaagcgtgcgttcattgttaccgacaaagacctgttcaaactgggttacgtgaacaaaatcaccaaagttctggatgaaattgacatcaagtactccatcttcactgatatcaaatccgacccaacgattgatagcgtgaaaaagggcgctaaagaaatgctgaactttgaaccggacaccatcatcagcatcggtggtggctctcctatggatgctgcgaaggtcatgcacctgctgtacgaatacccggaagcggaaatcgaaaacctggctatcaacttcatggacatccgcaaacgtatctgcaacttcccgaagctgggcactaaagctatttccgttgccatcccgactaccgcgggcactggttccgaagccacgccgttcgccgtgatcaccaacgatgaaaccggtatgaaatacccgctgacctcttacgaactgaccccgaacatggcaattatcgacaccgagctgatgctgaacatgccgcgcaagctgaccgctgctaccggcatcgacgctctggtacatgctattgaggcgtacgtttccgtgatggctaccgattacaccgacgaactggccctgcgtgcgatcaaaatgattttcaagtacctgcctcgcgcttacaaaaacggcacgaatgacatcgaggcgcgtgagaaaatggcccatgcaagcaacatcgcgggcatggccttcgccaacgcgttcctgggcgtgtgccactctatggctcacaaactgggtgctatgcaccacgtgccgcacggtatcgcgtgtgctgtcctgatcgaagaagtaattaagtacaacgctactgattgcccgactaaacagaccgccttcccacagtacaaatctcctaacgctaaacgtaagtacgctgagatcgccgaatacctgaacctgaagggtacgagcgacactgagaaagttactgcgctgatcgaagctatctctaaactgaaaattgacctgtccatcccgcagaacatcagcgccgcaggcatcaacaaaaaggacttttacaacacgctggacaaaatgagcgaactggcttttgacgaccagtgcaccactgcaaacccgcgttacccgctgatctctgagctgaaagacatttatatcaaatctttt

SEQ ID NO: 218 - DNA, 2573 bp, Artificial Sequence
  Synthetic Construct
atgaaagtgacgaaccaaaaagaactgaaacaaaaactgaatgaactgcgtgaggcccagaaaaagttcgctacgtatacccaggagcaagttgacaagatcttcaaacagtgtgccattgcggctgccaaagagcgtattaacttggccaaactggcggtggaagaaaccggcatcggtctggtcgaggacaagattatcaagaatcactttgccgcggagtatatctacaacaaatacaaaaacgaaaagacttgcggcatcattgatcatgatgacagcttgggtatcacgaaagtcgcagaaccaatcggtattgtcgcggcaattgtcccgaccactaatccgaccagcaccgcgatcttcaagagcttgatcagcctgaaaacccgcaacgcgattttcttcagcccgcacccgcgtgcgaagaagagcaccatcgcagcggcgaagctgattttggatgccgcggttaaggccggtgcaccgaaaaacattattggctggattgacgagccgagcattgagctgtctcaggacctgatgagcgaagcggacattattctggccaccggtggtccgtctatggttaaggcagcgtactccagcggtaagcctgctatcggcgttggtgcgggcaatacgccggctatcatcgatgaaagcgcggatattgatatggcagttagctccatcattctgggtaaaacctacgacaatggtgttatctgtgcaagcgagcaaagcatcctggtgatgaatagcatttacgagaaggtcaaagcggagtttgttaagcgtggttcctatattctgaaccagaacgagattgcaaaaatcaaagaaacgatgtttaagaatggcgcgattaatgcagatattgttggtaagtccgcatacattatcgcgaagatggcgggtatcgaagtgccgcaaaccaccaaaatcttgatcggcgaagtgcagcacgtggagaagagcgaactgttcagccatgagaaactgagcccggttctggctatgtacaaagtgaaggactttgacgaagccctgaagaaagctcagcgtctgattgagctgggcggcagcggtcacacgagcagcctgtatatcgatagccaaaacaataaggacaaggtgaaagagttcggtctggcgatgaaaacctctatcacgtttatcaacatgccgagcagccaaggtgcgagcggcgatctgtataacttcgcaatcgcgccttcttttacgctgggttgcggtacctggggcggtaattcggtgagccagaatgtcgagccgaagcacctgctgaacatcaaatcggtcgcggagcgccgtgagaagagacctggttcaaagtcccacagaaaatttacttcaaatacggctgcctgcgtttcgcgctgaaagaactgaaagacatgaacaaaaagcgtgcgttcattgttaccgacaaagacctgttcaaactgggttacgtgaacaaaatcaccaaagttctggatgaaattgacatcaagtactccatcttcactgatatcaaatccgacccaacgattgatagcgtgaaaaagggcgctaaagaaatgctgaactttgaaccggacaccatcatcagcatcggtggtggctctcctatggatgctgcgaaggtcatgcacctgctgtacgaatacccggaagcggaaatcgaaaacctggctatcaacttcatggacatccgcaaacgtatctgcaacttcccgaagctgggcactaaagctatttccgttgccatcccgactaccgcgggcactggttccgaagccacgccgttcgccgtgatcaccaacgatgaaaccggtatgaaatacccgctgacctcttacgaactgaccccgaacatggcaattatcgacaccgagctgatgctgaacatgccgcgcaagctgaccgctgctaccggcatcgacgctctggtacatgctattgaggcgtacgtttccgtgatggctaccgattacaccgacgaactggccctgcgtgcgatcaaaatgattttcaagtacctgcctcgcgcttacaaaaacggcacgaatgacatcgaggcgcgtgagaaaatggcccatgcaagcaacatcgcgggcatggccttcgccaacgcgttcctgggcgtgtgccactctatggctcacaaactgggtgctatgcaccacgtgccgcacggtatcgcgtgtgctgtcctgatcgaagaagtaattaagtacaacgctactgattgcccgactaaacagaccgccttcccacagtacaaatctcctaacgctaaacgtaagtacgctgagatcgccgaatacctgaacctgaagggtacgagcgacactgagaaagttactgcgctgatcgaagctatctctaaactgaaaattgacctgtccatcccgcagaacatcagcgccgcaggcatcaacaaaaaggacttttacaacacgctggacaaaatgagcgaactggcttttgacgaccagtgcaccactgcaaacccgcgttacccgctgatctctgagctgaaagacatttatatcaaatctttt

SEQ ID NO: 219 - DNA, 2573 bp, Artificial Sequence
  Synthetic Construct
atgaaagtgacgaaccaaaaagaactgaaacaaaaactgaatgaactgcgtgaggcccagaaaaagttcgctacgtatacccaggagcaagttgacaagatcttcaaacagtgtgccattgcggctgccaaagagcgtattaacttggccaaactggcggtggaagaaaccggcatcggtctggtcgaggacaagattatcaagaatcactttgccgcggagtatatctacaacaaatacaaaaacgaaaagacttgcggcatcattgatcatgatgacagcttgggtatcacgaaagtcgcagaaccaatcggtattgtcgcggcaattgtcccgaccactaatccgaccagcaccgcgatcttcaagagcttgatcagcctgaaaacccgcaacgcgattttcttcagcccgcacccgcgtgcgaagaagagcaccatcgcagcggcgaagctgattttggatgccgcggttaaggccggtgcaccgaaaaacattattggctggattgacgagccgagcattgagctgtctcaggacctgatgagcgaagcggacattattctggccaccggtggtccgtctatggttaaggcagcgtactccagcggtaagcctgctatcggcgttggtgcgggcaatacgccggctatcatcgatgaaagcgcggatattgatatggcagttagctccatcattctgtccgcgacctacgacaatggtgttatctgtgcaagcgagcaaagcatcctggtgatgaatagcatttacgagaaggtcaaagaagagtttgttaagcgtggttcctatattctgaaccagaacgagattgcaaaaatcaaagaaacgatgtttaagaatggcgcgattaatgcagatattgttggtaagtccgcatacattatcgcgaagatggcgggtatcgaagtgccgcaaaccaccaaaatcttgatcggcgaagtgcagagcgtggagaagagcgaactgttcagccatgagctgctgagcccggttctggctatgtacaaagtgaaggactttgacgaagccctgaagaaagctcagcgtctgattcacctgggcggcagcggtcacacgagcagcctgtatatcgatagccaaaacaataaggacaaggtgaaagagttcggtctggcgatgaaaacctctatcacgtttatcaacatgccgagcagccaaggtgcgagcggcgatctgtataacttcgcaatcgcgccttcttttacgctgggttgcggtacctggggcggtaattcggtgagccagaatgtcgagccgaagcacctgctgaacatcaaatcggtcgcggagcgccgtgagaagagacctggttcaaagtcccacagaaaatttacttcaaatacggctgcctgcgtttcgcgctgaaagaactgaaagacatgaacaaaaagcgtgcgttcattgttaccgacaaagacctgttcaaactgggttacgtgaacaaaatcaccaaagttctggatgaaattgacatcaagtactccatcttcactgatatcaaatccgacccaacgattgatagcgtgaaaaagggcgctaaagaaatgctgaactttgaaccggacaccatcatcagcatcggtggtggctctcctatggatgctgcgaaggtcatgcacctgctgtacgaatacccggaagcggaaatcgaaaacctggctatcaacttcatggacatccgcaaacgtatctgcaacttcccgaagctgggcactaaagctatttccgttgccatcccgactaccgcgggcactggttccgaagccacgccgttcgccgtgatcaccaacgatgaaaccggtatgaaatacccgctgacctcttacgaactgaccccgaacatggcaattatcgacaccgagctgatgctgaacatgccgcgcaagctgaccgctgctaccggcatcgacgctctggtacatgctattgaggcgtacgtttccgtgatggctaccgattacaccgacgaactggccctgcgtgcgatcaaaatgattttcaagtacctgcctcgcgcttacaaaaacggcacgaatgacatcgaggcgcgtgagaaaatggcccatgcaagcaacatcgcgggcatggccttcgccaacgcgttcctgggcgtgtgccactctatggctcacaaactgggtgctatgcaccacgtgccgcacggtatcgcgtgtgctgtcctgatcgaagaagtaattaagtacaacgctactgattgcccgactaaacagaccgccttcccacagtacaaatctcctaacgctaaacgtaagtacgctgagatcgccgaatacctgaacctgaagggtacgagcgacactgagaaagttactgcgctgatcgaagctatctctaaactgaaaattgacctgtccatcccgcagaacatcagcgccgcaggcatcaacaaaaaggacttttacaacacgctggacaaaatgagcgaactggcttttgacgaccagtgcaccactgcaaacccgcgttacccgctgatctctgagctgaaagacatttatatcaaatctttt

SEQ ID NO: 220 - DNA, 2573 bp, Artificial Sequence
  Synthetic Construct
atgaaagtgacgaaccaaaaagaactgaaacaaaaactgaatgaactgcgtgaggcccagaaaaagttcgctacgtatacccaggagcaagttgacaagatcttcaaacagtgtgccattgcggctgccaaagagcgtattaacttggccaaactggcggtggaagaaaccggcatcggtctggtcgaggacaagattatcaagaatcactttgccgcggagtatatctacaacaaatacaaaaacgaaaagacttgcggcatcattgatcatgatgacagcttgggtatcacgaaagtcgcagaaccaatcggtattgtcgcggcaattgtcccgaccactaatccgaccagcaccgcgatcttcaagagcttgatcagcctgaaaacccgcaacgcgattttcttcagcccgcacccgcgtgcgaagaagagcaccatcgcagcggcgaagctgattttggatgccgcggttaaggccggtgcaccgaaaaacattattggctggattgacgagccgagcattgagctgtctcaggacctgatgagcgaagcggacattattctggccaccggtggtccgtctatggttaaggcagcgtactccagcggtaagaaagctatcggcgttggtgcgggcaatacgccggctatcatcgatgaaagcgcggatattgatatggcagttagctccatcattctgtccaaaacctacgacaatggtgttatctgtgcaagcgagcaaagcatcctggtgatgaatagcatttacgagaaggtcaaaaaagagtttgttaagcgtggttcctatattctgaaccagaacgcgattgcaaaaatcaaagaaacgatgtttaagaatggcgcgattaatgcagatattgttggtaagtccgcatacattatcgcgaagatggcgggtatcgaagtgccgcaaaccaccaaaatcttgatcggcgaagtgcagagcgtggagaagagcgaactgttcagccatgagctgctgagcccggttctggctatgtacaaagtgaaggactttgacgaagccctgaagaaagctcagcgtctgattgagctgggcggcagcggtcacacgagcagcctgtatatcgatagccaaaacaataaggacaaggtgaaagagttcggtctggcgatgaaaacctctcgcacgtttatcaacatgccgagcagccaaggtgcgagcggcgatctgtataacttcgcaatcgcgccttcttttacgctgggttgcggtacctggggcggtaattcggtgagccagaatgtcgagccgaagcacctgctgaacatcaaatcggtcgcggagcgccgtgagaagagacctggttcaaagtcccacagaaaatttacttcaaatacggctgcctgcgtttcgcgctgaaagaactgaaagacatgaacaaaaagcgtgcgttcattgttaccgacaaagacctgttcaaactgggttacgtgaacaaaatcaccaaagttctggatgaaattgacatcaagtactccatcttcactgatatcaaatccgacccaacgattgatagcgtgaaaaagggcgctaaagaaatgctgaactttgaaccggacaccatcatcagcatcggtggtggctctcctatggatgctgcgaaggtcatgcacctgctgtacgaatacccggaagcggaaatcgaaaacctggctatcaacttcatggacatccgcaaacgtatctgcaacttcccgaagctgggcactaaagctatttccgttgccatcccgactaccgcgggcactggttccgaagccacgccgttcgccgtgatcaccaacgatgaaaccggtatgaaatacccgctgacctcttacgaactgaccccgaacatggcaattatcgacaccgagctgatgctgaacatgccgcgcaagctgaccgctgctaccggcatcgacgctctggtacatgctattgaggcgtacgtttccgtgatggctaccgattacaccgacgaactggccctgcgtgcgatcaaaatgattttcaagtacctgcctcgcgcttacaaaaacggcacgaatgacatcgaggcgcgtgagaaaatggcccatgcaagcaacatcgcgggcatggccttcgccaacgcgttcctgggcgtgtgccactctatggctcacaaactgggtgctatgcaccacgtgccgcacggtatcgcgtgtgctgtcctgatcgaagaagtaattaagtacaacgctactgattgcccgactaaacagaccgccttcccacagtacaaatctcctaacgctaaacgtaagtacgctgagatcgccgaatacctgaacctgaagggtacgagcgacactgagaaagttactgcgctgatcgaagctatctctaaactgaaaattgacctgtccatcccgcagaacatcagcgccgcaggcatcaacaaaaaggacttttacaacacgctggacaaaatgagcgaactggcttttgacgaccagtgcaccactgcaaacccgcgttacccgctgatctctgagctgaaagacatttatatcaaatctttt

SEQ ID NO: 221 - DNA, 2573 bp, Artificial Sequence
  Synthetic Construct
atgaaagtgacgaaccaaaaagaactgaaacaaaaactgaatgaactgcgtgaggcccagaaaaagttcgctacgtatacccaggagcaagttgacaagatcttcaaacagtgtgccattgcggctgccaaagagcgtattaacttggccaaactggcggtggaagaaaccggcatcggtctggtcgaggacaagattatcaagaatcactttgccgcggagtatatctacaacaaatacaaaaacgaaaagacttgcggcatcattgatcatgatgacagcttgggtatcacgaaagtcgcagaaccaatcggtattgtcgcggcaattgtcccgaccactaatccgaccagcaccgcgatcttcaagagcttgatcagcctgaaaacccgcaacgcgattttcttcagcccgcacccgcgtgcgaagaagagcaccatcgcagcggcgaagctgattttggatgccgcggttaaggccggtgcaccgaaaaacattattggctggattgacgagccgagcattgagctgtctcaggacctgatgaaagaagcggacattattctggccaccggtggtccgtctatggttaaggcagcgtactccagcggtaagcctgctatcggcgttggtgcgggcaatacgccggctatcatcgatgaaagcgcggatattgatatggcagttagctccatcattctgtccaaaacctacgacaatggtgttatctgtgcaagcgagcaaagcatcctggtgatgaatagcatttacgagaaggtcaaagaagagtttgttaagcgtggttcctatattctgaaccagaacgagattgcaaaaatcaaagaaacgatgtttaagaatggcgcgattaatgcagatattgttggtaagtccgcatacattatcgcgaagatggcgggtatcgaagtgccgcaaaccaccaaaatcttgatcggcgaagtgcagagcgtggagaagagcgaactgttcagcgaggagaaactgagcccggttctggctatgtacaaagtgaaggactttgacgaagccctgaagaaagctcagcgtctgattgagctgggcggcagcggtcacacgagcagcctgtatatcgatagccaaaacaataaggacaaggtgaaagagttcggtctggagatgaaaacctctcgcacgtttatcaacatgccgagcagccaaggtgcgagcggcgatctgtataacttcgcaatcgcgccttcttttacgctgggttgcggtacctgggagggtaattcggtgagccagaatgtcgagccgaagcacctgctgaacatcaaatcggtcgcggagcgccgtgagaagagacctggttcaaagtcccacagaaaatttacttcaaatacggctgcctgcgtttcgcgctgaaagaactgaaagacatgaacaaaaagcgtgcgttcattgttaccgacaaagacctgttcaaactgggttacgtgaacaaaatcaccaaagttctggatgaaattgacatcaagtactccatcttcactgatatcaaatccgacccaacgattgatagcgtgaaaaagggcgctaaagaaatgctgaactttgaaccggacaccatcatcagcatcggtggtggctctcctatggatgctgcgaaggtcatgcacctgctgtacgaatacccggaagcggaaatcgaaaacctggctatcaacttcatggacatccgcaaacgtatctgcaacttcccgaagctgggcactaaagctatttccgttgccatcccgactaccgcgggcactggttccgaagccacgccgttcgccgtgatcaccaacgatgaaaccggtatgaaatacccgctgacctcttacgaactgaccccgaacatggcaattatcgacaccgagctgatgctgaacatgccgcgcaagctgaccgctgctaccggcatcgacgctctggtacatgctattgaggcgtacgtttccgtgatggctaccgattacaccgacgaactggccctgcgtgcgatcaaaatgattttcaagtacctgcctcgcgcttacaaaaacggcacgaatgacatcgaggcgcgtgagaaaatggcccatgcaagcaacatcgcgggcatggccttcgccaacgcgttcctgggcgtgtgccactctatggctcacaaactgggtgctatgcaccacgtgccgcacggtatcgcgtgtgctgtcctgatcgaagaagtaattaagtacaacgctactgattgcccgactaaacagaccgccttcccacagtacaaatctcctaacgctaaacgtaagtacgctgagatcgccgaatacctgaacctgaagggtacgagcgacactgagaaagttactgcgctgatcgaagctatctctaaactgaaaattgacctgtccatcccgcagaacatcagcgccgcaggcatcaacaaaaaggacttttacaacacgctggacaaaatgagcgaactggcttttgacgaccagtgcaccactgcaaacccgcgttacccgctgatctctgagctgaaagacatttatatcaaatctttt

SEQ ID NO: 222 - DNA, 2573 bp, Artificial Sequence
  Synthetic Construct
atgaaagtgacgaaccaaaaagaactgaaacaaaaactgaatgaactgcgtgaggcccagaaaaagttcgctacgtatacccaggaccaagttgacaagatcttcaaacagtgtgccattgcggctgccaaagagcgtattaacttggccaaactggcggtggaagaaaccggcatcggtctggtcgaggacaagattatcaagaatcactttgccgcggagtatatctacaacaaatacaaaaacgaaaagacttgcggcatcattgatcatgatgacagcttgggtatcacgaaagtcgcagaaccaatcggtattgtcgcggcaattgtcccgaccactaatccgaccagcaccgcgatcttcaagagcttgatcagcctgaaaacccgcaacgcgattttcttcagcccgcacccgcgtgcgaagaagagcaccatcgcagcggcgaagctgattttggatgccgcggttaaggccggtgcaccgaaaaacattattggctggattgacgagccgagcattgagctgtctcaggacctgatgagcgaagcggacattattctggccaccggtggtccgtctatggttaaggcagcgtactccagcggtaagcctgctatcggcgttggtgcgggcaatacgccggctatcatcgatgaaagcgcggatattgatatggcagttagctccatcattctgtccaaaacctacgacaatggtgttatctgtgcaagcgagcaaagcatcctggtgatgaatagcatttacgagaaggtcaaagaagagtttgttaagcgtggttcctatattctgaaccagaacgagattgcaaaaatcaaagaaacgatgtttaagaatggcgcgattaatgcagatattgttggtaagtccgcatacattatcgcgaagatggcgggtatcgaagtgccgcaaaccaccaaaatcttgatcggcgaagtgcagcacgtggagaagagcgaactgttcagccatgagaaactgagcccggttctggctatgtacaaagtgaaggactttgacgaagccctggacaaagctcagcgtctgattgagctgggcggcagcggtcacacgagcagcctgtatagcgatagccaaaacaataaggacaaggtgaaagagttcggtctggcgatgaaaacctctcgcacgtttatcaacatgccgagcagccaaggtgcgagcggcgatctgtataacttcgcaatcgcgccttcttttacgctgggttgcggtacctggggcggtaattcggtgagccagaatgtcgagccgaagcacctgctgaacatcaaatcggtcgcggagcgccgtgagaagagacctggttcaaagtcccacagaaaatttacttcaaatacggctgcctgcgtttcgcgctgaaagaactgaaagacatgaacaaaaagcgtgcgttcattgttaccgacaaagacctgttcaaactgggttacgtgaacaaaatcaccaaagttctggatgaaattgacatcaagtactccatcttcactgatatcaaatccgacccaacgattgatagcgtgaaaaagggcgctaaagaaatgctgaactttgaaccggacaccatcatcagcatcggtggtggctctcctatggatgctgcgaaggtcatgcacctgctgtacgaatacccggaagcggaaatcgaaaacctggctatcaacttcatggacatccgcaaacgtatctgcaacttcccgaagctgggcactaaagctatttccgttgccatcccgactaccgcgggcactggttccgaagccacgccgttcgccgtgatcaccaacgatgaaaccggtatgaaatacccgctgacctcttacgaactgaccccgaacatggcaattatcgacaccgagctgatgctgaacatgccgcgcaagctgaccgctgctaccggcatcgacgctctggtacatgctattgaggcgtacgtttccgtgatggctaccgattacaccgacgaactggccctgcgtgcgatcaaaatgattttcaagtacctgcctcgcgcttacaaaaacggcacgaatgacatcgaggcgcgtgagaaaatggcccatgcaagcaacatcgcgggcatggccttcgccaacgcgttcctgggcgtgtgccactctatggctcacaaactgggtgctatgcaccacgtgccgcacggtatcgcgtgtgctgtcctgatcgaagaagtaattaagtacaacgctactgattgcccgactaaacagaccgccttcccacagtacaaatctcctaacgctaaacgtaagtacgctgagatcgccgaatacctgaacctgaagggtacgagcgacactgagaaagttactgcgctgatcgaagctatctctaaactgaaaattgacctgtccatcccgcagaacatcagcgccgcaggcatcaacaaaaaggacttttacaacacgctggacaaaatgagcgaactggcttttgacgaccagtgcaccactgcaaacccgcgttacccgctgatctctgagctgaaagacatttatatcaaatctttt

SEQ ID NO: 223 - DNA, 2573 bp, Artificial Sequence
  Synthetic Construct
atgaaagtgacgaaccaaaaagaactgaaacaaaaactgaatgaactgcgtgaggcccagaaaaagttcctgacgtatacccaggagcaagttgacaagatcttcaaacagtgtgccattgcggctgccaaagagcgtattaacttggccaaactggcggtggaagaaaccggcatcggtctggtcgaggacaagattatcaagaatcactttgccgcggagtatatctacaacaaatacaaaaacgaaaagacttgcggcatcattgatcatgatgacagcttgggtatcacgaaagtcgcagaaccaatcggtattgtcgcggcaattgtcccgaccactaatccgaccagcaccgcgatcttcaagagcttgatcagcctggcgacccgcaacgcgattttcttcagcccgcacccgcgtgcgaagaagagcaccatcgcagcggcgaagctgattttggatgccgcggttaaggccggtgcaccgaaaaacattattggctggattgacgagccgagcattgagctgtctcaggacctgatgagcgaagcggacattattctggccaccggtggtccgtctatggttaaggcagcgtactccagcggtaagcctgctatcggcgttggtgcgggcaatacgccggctatcatcgatgaaagcgcggatattgatatggcagttagctccatcattctgggtaaaacctacgacaatggtgttatctgtgcaagcgagcaaagcatcctggtgatgaatagcatttacgagaaggtcaaagaagagtttgttaagcgtggttcctatattctgaaccagaacgagattgcaaaaatcaaagaaacgatgtttaagaatggcgcgattaatgcagatattgttggtaagtccgcatacattatcgcgaagatggcgggtatcgaagtgccgcaaaccaccaaaatcttgatcggcgaagtgcagagcgtggagaagagcgaactgttcagccatgagaaactgagcccggttctggctatgtacaaagtgaaggactttgacgaagccctgaagaaagctcagcgtctgattgagctgggcggcagcggtcacacgagcagcctgtatatcgatagccaaaacaataaggacaaggtgaaagagttcggtctggcgatgaaaacctctcgcacgtttatcaacatgccgagcagccaaggtgcgagcggcgatctgtataacttcgcaatcgcgccttcttttacgctggcgtgcggtacctggggcggtaattcggtgagccagaatgtcgagccgaagcacctgctgaacatcaaatcggtcgcggagcgccgtgagaagagacctggttcaaagtcccacagaaaatttacttcaaatacggctgcctgcgtttcgcgctgaaagaactgaaagacatgaacaaaaagcgtgcgttcattgttaccgacaaagacctgttcaaactgggttacgtgaacaaaatcaccaaagttctggatgaaattgacatcaagtactccatcttcactgatatcaaatccgacccaacgattgatagcgtgaaaaagggcgctaaagaaatgctgaactttgaaccggacaccatcatcagcatcggtggtggctctcctatggatgctgcgaaggtcatgcacctgctgtacgaatacccggaagcggaaatcgaaaacctggctatcaacttcatggacatccgcaaacgtatctgcaacttcccgaagctgggcactaaagctatttccgttgccatcccgactaccgcgggcactggttccgaagccacgccgttcgccgtgatcaccaacgatgaaaccggtatgaaatacccgctgacctcttacgaactgaccccgaacatggcaattatcgacaccgagctgatgctgaacatgccgcgcaagctgaccgctgctaccggcatcgacgctctggtacatgctattgaggcgtacgtttccgtgatggctaccgattacaccgacgaactggccctgcgtgcgatcaaaatgattttcaagtacctgcctcgcgcttacaaaaacggcacgaatgacatcgaggcgcgtgagaaaatggcccatgcaagcaacatcgcgggcatggccttcgccaacgcgttcctgggcgtgtgccactctatggctcacaaactgggtgctatgcaccacgtgccgcacggtatcgcgtgtgctgtcctgatcgaagaagtaattaagtacaacgctactgattgcccgactaaacagaccgccttcccacagtacaaatctcctaacgctaaacgtaagtacgctgagatcgccgaatacctgaacctgaagggtacgagcgacactgagaaagttactgcgctgatcgaagctatctctaaactgaaaattgacctgtccatcccgcagaacatcagcgccgcaggcatcaacaaaaaggacttttacaacacgctggacaaaatgagcgaactggcttttgacgaccagtgcaccactgcaaacccgcgttacccgctgatctctgagctgaaagacatttatatcaaatctttt

SEQ ID NO: 224 - DNA, 2573 bp, Artificial Sequence
  Synthetic Construct
atgaaagtgacgaaccaaaaagaactgaaacaaaaactgaatgaactgcgtgaggcccagaaaaagttcgctacgtatacccaggagcaagttgacaagatcttcaaacagtgtgccattgcggctgccaaagagcgtattaacttggccaaactggcggtggaagaaaccggcatcggtctggtcgaggacaagattatcaagaatcactttgccgcggagtatatctacaacaaatacaaaaaccacaagacttgcggcatcattgatcatgatgacagcttgggtatcacgaaagtcgcagaaccaatcggtattgtcgcggcaattgtcccgaccactaatccgaccagcaccgcgatcttcaagagcttgatcagcctgaaaacccgcaacgcgattttcttcagcccgcacccgcgtgcgaagaagagcaccatcgcagcggcgaagctgattttggatgccgcggttaaggccggtgcaccgaaaaacattattggctggattgacgagccgagcattgagctgtctcaggacctgatgagcgaagcggacattattctggccaccggtggtccgtctatggttaaggcagcgtactccagcggtaagcctgctatcggcgttggtgcgggcaatacgccggctatcatcgatgaaagcgcggatattgatatggcagttagctccatcattctgtccaaaacctacgacaataacgttatctgtgcaagcgagcaaagcatcctggtgatgaatagcatttacgagaaggtcaaagaagagtttgttaagcgtggttcctatattctgaaccagaacgagattgcaaaaatcaaagaaacgatgtttaagaatggcgcgattaatgcagatattgttggtaagtccgcatacattatcgcgaagatggcgggtatcgaagtgccgcaaaccaccaaaatcttgatcggcgaagtgcagagcgtggagaagagcgaactgttcagccatgagaaactgagcccggttctggctatgtacaaagtgaaggactttgacgaagccctgaagaaagctcagcgtctgattgagctgggcggcagcggtcacacgagcagcctgtatatcgatagccaaaacaataaggacaaggtgaaagagttcggtctggcgatgaaaacctctcgcttctttatcaacatgccgagcagccaaggtgcgagcggcgatctgtataacttcgcaatcgcgccttcttttacgctgggttgcccgacctggggcggtaattcggtgagccagaatgtcgagccgaagcacctgctgaacatcaaatcggtcgcggagcgccgtgagaagagacctggttcaaagtcccacagaaaatttacttcaaatacggctgcctgcgtttcgcgctgaaagaactgaaagacatgaacaaaaagcgtgcgttcattgttaccgacaaagacctgttcaaactgggttacgtgaacaaaatcaccaaagttctggatgaaattgacatcaagtactccatcttcactgatatcaaatccgacccaacgattgatagcgtgaaaaagggcgctaaagaaatgctgaactttgaaccggacaccatcatcagcatcggtggtggctctcctatggatgctgcgaaggtcatgcacctgctgtacgaatacccggaagcggaaatcgaaaacctggctatcaacttcatggacatccgcaaacgtatctgcaacttcccgaagctgggcactaaagctatttccgttgccatcccgactaccgcgggcactggttccgaagccacgccgttcgccgtgatcaccaacgatgaaaccggtatgaaatacccgctgacctcttacgaactgaccccgaacatggcaattatcgacaccgagctgatgctgaacatgccgcgcaagctgaccgctgctaccggcatcgacgctctggtacatgctattgaggcgtacgtttccgtgatggctaccgattacaccgacgaactggccctgcgtgcgatcaaaatgattttcaagtacctgcctcgcgcttacaaaaacggcacgaatgacatcgaggcgcgtgagaaaatggcccatgcaagcaacatcgcgggcatggccttcgccaacgcgttcctgggcgtgtgccactctatggctcacaaactgggtgctatgcaccacgtgccgcacggtatcgcgtgtgctgtcctgatcgaagaagtaattaagtacaacgctactgattgcccgactaaacagaccgccttcccacagtacaaatctcctaacgctaaacgtaagtacgctgagatcgccgaatacctgaacctgaagggtacgagcgacactgagaaagttactgcgctgatcgaagctatctctaaactgaaaattgacctgtccatcccgcagaacatcagcgccgcaggcatcaacaaaaaggacttttacaacacgctggacaaaatgagcgaactggcttttgacgaccagtgcaccactgcaaacccgcgttacccgctgatctctgagctgaaagacatttatatcaaatctttt

SEQ ID NO: 225 - DNA, 2573 bp, Artificial Sequence
  Synthetic Construct
atgaaagtgacgaaccaaaaagaactgaaacaaaaactgaatgaactgcgtgaggcccagaaaaagttcgctacgtatacccaggagcaagttgacaagatcttcaaacagtgtgccattgcggctgccaaagagcgtattaacttggccaaactggcggtggaagaaaccggcatcggtctggtcgaggacaagattatcaagaatcactttgccgcggagtatatctacaacaaatacaaaaacgaaaagacttgcggcatcattgatcatgatgacagcttgggtatcacgaaagtcgcagaaccaatcggtattgtcgcggcaattgtcccgaccactaatccgaccagcaccgcgatcttcaagagcttgatcagcctgaaaacccgcaacgcgattttcttcagcccgcacccgcgtgcgaagaagagcaccatcgcagcggcgaagctgattttggatgccgcggttaaggccggtgcaccgaaaaacattattggctggattgacgagccgagcattgagctgtctcaggacctgatgagcgaaccggacattattctggccaccggtggtccgtctatggttaaggcagcgtactccagcggtaagcctgctatcggcgcgggtgcgggcaatacgccggctatcatcgatgaaagcgcggatattgatatggcagttagctccatcattctgtccaaaacctacgacaatggtgttatctgtgcaagcgagcaaagcatcctggtgatgaatagcatttacgagaaggtcaaagaagagtttgttaagcgtggttcctatattctgaaccaggaggagattgcaaaaatcaaagaaacgatgtttaagaatggcgcgattaatgcagatattgttggtaagtccgcatacattatcgcgaagatggcgggtatcgaagtgccgcaaaccaccaaaatcttgatcggcgaagtgcagagcgtggagaagagcgaactgttcagccatgagaaactgagcccggttctggctatgtacaaagtgaaggactttgacgaagccctgaagaaagctcagcgtctgattgagctgggcggcagcggtcacacgagcagcctgtatagcgatagccaaaacaataaggacaaggtgaaagagttcggtctggcgatgaaaacctctcgcacgtttatcaacatgccgagcagccaaggtgcgagcggcgatctgtataacttcgcaatcgcgccttcttttacgctgggttgcggtacctggggcggtaattcggtgagccagaatgtcgagccgaagcacctgctgaacatcaaatcggtcgcggagcgccgtgagaagagacctggttcaaagtcccacagaaaatttacttcaaatacggctgcctgcgtttcgcgctgaaagaactgaaagacatgaacaaaaagcgtgcgttcattgttaccgacaaagacctgttcaaactgggttacgtgaacaaaatcaccaaagttctggatgaaattgacatcaagtactccatcttcactgatatcaaatccgacccaacgattgatagcgtgaaaaagggcgctaaagaaatgctgaactttgaaccggacaccatcatcagcatcggtggtggctctcctatggatgctgcgaaggtcatgcacctgctgtacgaatacccggaagcggaaatcgaaaacctggctatcaacttcatggacatccgcaaacgtatctgcaacttcccgaagctgggcactaaagctatttccgttgccatcccgactaccgcgggcactggttccgaagccacgccgttcgccgtgatcaccaacgatgaaaccggtatgaaatacccgctgacctcttacgaactgaccccgaacatggcaattatcgacaccgagctgatgctgaacatgccgcgcaagctgaccgctgctaccggcatcgacgctctggtacatgctattgaggcgtacgtttccgtgatggctaccgattacaccgacgaactggccctgcgtgcgatcaaaatgattttcaagtacctgcctcgcgcttacaaaaacggcacgaatgacatcgaggcgcgtgagaaaatggcccatgcaagcaacatcgcgggcatggccttcgccaacgcgttcctgggcgtgtgccactctatggctcacaaactgggtgctatgcaccacgtgccgcacggtatcgcgtgtgctgtcctgatcgaagaagtaattaagtacaacgctactgattgcccgactaaacagaccgccttcccacagtacaaatctcctaacgctaaacgtaagtacgctgagatcgccgaatacctgaacctgaagggtacgagcgacactgagaaagttactgcgctgatcgaagctatctctaaactgaaaattgacctgtccatcccgcagaacatcagcgccgcaggcatcaacaaaaaggacttttacaacacgctggacaaaatgagcgaactggcttttgacgaccagtgcaccactgcaaacccgcgttacccgctgatctctgagctgaaagacatttatatcaaatctttt

SEQ ID NO: 226 - DNA, 2573 bp, Artificial Sequence
  Synthetic Construct
atgaaagtgacgaaccaaaaagaactgaaacaaaaactgaatgaactgcgtgaggcccagaaaaagttcgcttgctatacccaggagcaagttgacaagatcttcaaacagtgtgccattgcggctgccaaagagcgtattaacttggcccgtctggcggtggaagaaaccggcatcggtctggtcgaggacaagattatcaagaatcactttgccgcggagtatatctacaacaaatacaaaaacggtaagacttgcggcatcattgatcatgatgacagcttgggtatcacgaaagtcgcagaaccaatcggtattgtcgcggcaattgtcccgaccactaatccgaccagcaccgcgatcttcaagagcttgatcagcctgaaaacccgcaacgcgattttcttcagcccgcacccgcgtgcgaagaagagcaccatcgcagcggcgaagctgattttggatgccgcggttaaggccggtgcaccgaaaaacattattggctggattgacgagccgagcattgagctgtctcaggacctgatgagcgaagcggacattattctggccaccggtggtccgtctatggttaaggcagcgtactccagcggtaagcctgctatcggcgttggtgcgggcaatacgccggctatcatcgatgaaagcgcggatattgatatggcagttagctccatcattctgtccaaaacctacgacaatggtgttatctgtgcaagcgagcaaagcatcctggtgatgaatagcatttacgagaaggtcaaagaagagtttgttaagcgtggttcctatattctgaaccagaacgagattgcaaaaatcaaagaaacgatgtttaagaatggcgcgattaatgcagatattgttggtaagtccgcatacattatcgcgaagatggcgggtatcgaagtgccgcaaaccaccaaaatcttgatcggcgaagtgcagagcgtggagaagagcgaactgttcagccatgagaaactgagcccggttctggctatgtacaaagtgaaggactttgacgaagccctgaagaaagctcagcgtctgattgagctgggcggcagcggtcacacgagcagcctgtatatcgatagccaaaacaataaggacaaggtgaaagagttcggtctggcgatgaaaacctctcgcacgtttatcaacatgccgagcagccaaggtgcgagcggcgatctgtataacttcgcaatcgcgccttcttttacgctgggttgcggtacctgggagggtaattcggtgagccagaatgtcgagccgaagcacctgctgaacatcaaatcggtcgcggagcgccgtgagaagagacctggttcaaagtcccacagaaaatttacttcaaatacggctgcctgcgtttcgcgctgaaagaactgaaagacatgaacaaaaagcgtgcgttcattgttaccgacaaagacctgttcaaactgggttacgtgaacaaaatcaccaaagttctggatgaaattgacatcaagtactccatcttcactgatatcaaatccgacccaacgattgatagcgtgaaaaagggcgctaaagaaatgctgaactttgaaccggacaccatcatcagcatcggtggtggctctcctatggatgctgcgaaggtcatgcacctgctgtacgaatacccggaagcggaaatcgaaaacctggctatcaacttcatggacatccgcaaacgtatctgcaacttcccgaagctgggcactaaagctatttccgttgccatcccgactaccgcgggcactggttccgaagccacgccgttcgccgtgatcaccaacgatgaaaccggtatgaaatacccgctgacctcttacgaactgaccccgaacatggcaattatcgacaccgagctgatgctgaacatgccgcgcaagctgaccgctgctaccggcatcgacgctctggtacatgctattgaggcgtacgtttccgtgatggctaccgattacaccgacgaactggccctgcgtgcgatcaaaatgattttcaagtacctgcctcgcgcttacaaaaacggcacgaatgacatcgaggcgcgtgagaaaatggcccatgcaagcaacatcgcgggcatggccttcgccaacgcgttcctgggcgtgtgccactctatggctcacaaactgggtgctatgcaccacgtgccgcacggtatcgcgtgtgctgtcctgatcgaagaagtaattaagtacaacgctactgattgcccgactaaacagaccgccttcccacagtacaaatctcctaacgctaaacgtaagtacgctgagatcgccgaatacctgaacctgaagggtacgagcgacactgagaaagttactgcgctgatcgaagctatctctaaactgaaaattgacctgtccatcccgcagaacatcagcgccgcaggcatcaacaaaaaggacttttacaacacgctggacaaaatgagcgaactggcttttgacgaccagtgcaccactgcaaacccgcgttacccgctgatctctgagctgaaagacatttatatcaaatctttt

SEQ ID NO: 227 - DNA, 2573 bp, Artificial Sequence
  Synthetic Construct
atgaaagtgacgaaccaaaaagaactgaaacaaaaagacaatgaactgcgtgaggcccagaaaaagttcgctacgtatacccaggagcaagttgacaagatcttcaaacagtgtgccattgcggctgccaaagagcgtattaacttggcccgtctggcggtggaagaaaccggcatcggtctggtcgaggacaagattatcaagaatcactttgccgcggagtatatctacaacaaatacaaaaacgaaaagacttgcggcatcattgatcatgatgacagcttgggtatcacgaaagtcgcagaaccaatcggtattgtcgcggcaattgtcccgaccactaatccgaccagcaccgcgatcttcaagagcttgatcagcctgaaaacccgcaacgcgattttcttcagcccgcacccgcgtgcgaagaagagcaccatcgcagcggcgaagctgattttggatgccgcggttaaggccggtgcaccgaaaaacattattggctggattgacgagccgagcattgagctgtctcaggacctgatgagcgaagcggacattattctggccaccggtggtccgtctatggttaaggcagcgtactccagcggtaagcctgctatcggcgttggtgcgggcaatacgccggctatcatcgatgaaagcgcggatattgatatggcagttagctccatcattctgtccaaaacctacgacaatggtgttatctgtgcaagcgagcaaagcatcctggtgatgaatagcatttacgagaaggtcaaagcggagtttgttaagcgtggttcctatattctgaaccagaacgagattgcaaaaatcaaagaaacgatgtttaagaatggcgcgattaatgcagatattgttggtaagtccgcatacattatcgcgaagatggcgggtatcgaagtgccgcaaaccaccaaaatcttgatcggcgaagtgcagagcgtggagaagagcgaactgttcagcgaggagaaactgagcccggttctggctatgtacaaagtgaaggactttgacgaagccctgaagaaagctcagcgtctgattcacctgggcggcagcggtcacacgagcagcctgtatatcgatagccaaaacaataaggacaaggtgaaagagttcggtctggcgatgaaaacctctcgcacgtttatcaacatgccgagcagccaaggtgcgagcggcgatctgtataacttcgcaatcgcgccttcttttacgctgggttgcggtacctggggcggtaattcggtgagccagaatgtcgagccgaagcacctgctgaacatcaaatcggtcgcggagcgccgtgagaagagacctggttcaaagtcccacagaaaatttacttcaaatacggctgcctgcgtttcgcgctgaaagaactgaaagacatgaacaaaaagcgtgcgttcattgttaccgacaaagacctgttcaaactgggttacgtgaacaaaatcaccaaagttctggatgaaattgacatcaagtactccatcttcactgatatcaaatccgacccaacgattgatagcgtgaaaaagggcgctaaagaaatgctgaactttgaaccggacaccatcatcagcatcggtggtggctctcctatggatgctgcgaaggtcatgcacctgctgtacgaatacccggaagcggaaatcgaaaacctggctatcaacttcatggacatccgcaaacgtatctgcaacttcccgaagctgggcactaaagctatttccgttgccatcccgactaccgcgggcactggttccgaagccacgccgttcgccgtgatcaccaacgatgaaaccggtatgaaatacccgctgacctcttacgaactgaccccgaacatggcaattatcgacaccgagctgatgctgaacatgccgcgcaagctgaccgctgctaccggcatcgacgctctggtacatgctattgaggcgtacgtttccgtgatggctaccgattacaccgacgaactggccctgcgtgcgatcaaaatgattttcaagtacctgcctcgcgcttacaaaaacggcacgaatgacatcgaggcgcgtgagaaaatggcccatgcaagcaacatcgcgggcatggccttcgccaacgcgttcctgggcgtgtgccactctatggctcacaaactgggtgctatgcaccacgtgccgcacggtatcgcgtgtgctgtcctgatcgaagaagtaattaagtacaacgctactgattgcccgactaaacagaccgccttcccacagtacaaatctcctaacgctaaacgtaagtacgctgagatcgccgaatacctgaacctgaagggtacgagcgacactgagaaagttactgcgctgatcgaagctatctctaaactgaaaattgacctgtccatcccgcagaacatcagcgccgcaggcatcaacaaaaaggacttttacaacacgctggacaaaatgagcgaactggcttttgacgaccagtgcaccactgcaaacccgcgttacccgctgatctctgagctgaaagacatttatatcaaatctttt

SEQ ID NO: 228 - DNA, 2573 bp, Artificial Sequence
  Synthetic Construct
atgaaagtgacgaaccaaaaagaactgaaacaaaaactgaatgaactgcgtgaggcccagaaaaagttcgctacgtatacccaggagcaagttgacaagatcttcaaacagtgtgccattgcggctgccaaagagcgtattaacttggccaaactggcggtggaagaaaccggcatcggtctggtcgaggacaagattatcaagaatcactttgccgcggagtatatctacaacaaatacaaaaacgaaaagacttgcggcatcattgatcatgatgacagcttgggtatcacgaaagtcgcagaaccaatcggtattgtcgcggcaattgtcccgaccactaatccgaccagcaccgcgatcttcaagagcttgatcagcctgaaaacccgcaacgcgattttcttcagcccgcacccgcgtgcgaagaagagcaccatcgcagcggcgaagctgattttggatgccgcggttaaggccggtgcaccgaaaaacattattggctggattgacgagccgagcattgagctgtctcaggacatgatgagcgaagcggacattattctggccaccggtggtccgtctatggttaaggcagcgtactccagcggtaagcctgctatcggcgttggtgcgggcaatacgccggctatcatcgatgaaagcgcggatattgatatggcagttagctccatcattctgtccaaaacctacgacaatggtgttatctgtgcaagcgagcaaagcatcctggtgatgaatagcatttacgagaaggtcaaagaagagtttgttaagcgtggttcctatattctgaaccagaacgagattgcaaaaatcaaagaaacgatgtttaagaatggcgcgattaatgcagatattgttggtaagtccgcatacattatcgcgaagatggcgggtatcgaagtgccgcaaaccaccaaaatcttgatcggcgaagtgcagagcgtggagaagagcgaactgttcagcgaggagaaactgagcccggttctggctatgtacaaagtgaaggactttgacgaagccctggacaaagctcagcgtctgattaacctgggcggcagcggtcacacgagcagcctgtatatcgatagccaaaacaataaggacaaggtgaaagagttcggtctggcgatgaaaacctctcgcacgtttatcaacatgccgagcagccaaggtgcgagcggcgatctgtataacttcgcaatcgcgccttcttttacgctggcgtgcggtacctggggcggtaattcggtgagccagaatgtcgagccgaagcacctgctgaacatcaaatcggtcgcggagcgccgtgagaagagacctggttcaaagtcccacagaaaatttacttcaaatacggctgcctgcgtttcgcgctgaaagaactgaaagacatgaacaaaaagcgtgcgttcattgttaccgacaaagacctgttcaaactgggttacgtgaacaaaatcaccaaagttctggatgaaattgacatcaagtactccatcttcactgatatcaaatccgacccaacgattgatagcgtgaaaaagggcgctaaagaaatgctgaactttgaaccggacaccatcatcagcatcggtggtggctctcctatggatgctgcgaaggtcatgcacctgctgtacgaatacccggaagcggaaatcgaaaacctggctatcaacttcatggacatccgcaaacgtatctgcaacttcccgaagctgggcactaaagctatttccgttgccatcccgactaccgcgggcactggttccgaagccacgccgttcgccgtgatcaccaacgatgaaaccggtatgaaatacccgctgacctcttacgaactgaccccgaacatggcaattatcgacaccgagctgatgctgaacatgccgcgcaagctgaccgctgctaccggcatcgacgctctggtacatgctattgaggcgtacgtttccgtgatggctaccgattacaccgacgaactggccctgcgtgcgatcaaaatgattttcaagtacctgcctcgcgcttacaaaaacggcacgaatgacatcgaggcgcgtgagaaaatggcccatgcaagcaacatcgcgggcatggccttcgccaacgcgttcctgggcgtgtgccactctatggctcacaaactgggtgctatgcaccacgtgccgcacggtatcgcgtgtgctgtcctgatcgaagaagtaattaagtacaacgctactgattgcccgactaaacagaccgccttcccacagtacaaatctcctaacgctaaacgtaagtacgctgagatcgccgaatacctgaacctgaagggtacgagcgacactgagaaagttactgcgctgatcgaagctatctctaaactgaaaattgacctgtccatcccgcagaacatcagcgccgcaggcatcaacaaaaaggacttttacaacacgctggacaaaatgagcgaactggcttttgacgaccagtgcaccactgcaaacccgcgttacccgctgatctctgagctgaaagacatttatatcaaatctttt

SEQ ID NO: 229 - DNA, 2573 bp, Artificial Sequence
  Synthetic Construct
atgaaagtgacgaaccaaaaagaactgaaacaaaaactgaatgaactgcgtgaggcccagaaaaagttcgctacgtatacccaggagcaagttgacaagatcttcaaacagtgtgccattgcggctgccaaagagcgtattaacttggccaaactggcggtggaagaaaccggcatcggtctggtcgaggacaagattatcaagaatcactttgccgcggagtatatctacaacaaatacaaaaacggtaagacttgcggcatcattgatcatgatgacagcttgggtatcacgaaagtcgcagaaccaatcggtattgtcgcggcaattgtcccgaccactaatccgaccagcaccgcgatcttcaagagcttgatcagcctgaaaacccgcaacgcgattttcttcagcccgcacccgcgtgcgaagaagagcaccatcgcagcggcgaccctgattttggatgccgcggttaaggccggtgcaccgaaaaacattattggctggattgacgagccgagcattgagctgtctcaggacctgatgagcgaagcggacattattctggccaccggtggtccgtctatggttaaggcagcgtactccagcggtaagcctgctatcggcgttggtgcgggcaatacgccggctatcatcgatgaaagcgcggatattgatatggcagttagctccatcattctgtccaaaacctacgacaatggtgttatctgtgcaagcgagcaaagcatcctggtgatgaatagcatttacgagaaggtcaaagaagagtttgttaagcgtggttcctatattctgaaccagaacgcgattgcaaaaatcaaagaaacgatgtttaagaatggcgcgattaatgcagatattgttggtaagtccgcatacattatcgcgaagatggcgggtatcgaagtgccgcaaaccaccaaaatcttgatcggcgaagtgcagcacgtggagaagagcgaactgttcagccatgagaaactgagcccggttctggctatgtacaaagtgaaggactttgacgaagccctgaagaaagctcagcgtctgattcacctgggcggcagcggtcacacgagcagcctgtatatcgatagccaaaacaataaggacaaggtgaaagagttcggtctggcgatgaaaacctctcgcacgtttatcaacatgccgagcagccaaggtgcgagcggcgatctgtataacttcgcaatcgcgccttcttttacgctgggttgcggtacctggggcggtaattcggtgagccagaatgtcgagccgaagcacctgctgaacatcaaatcggtcgcggagcgccgtgagaagagacctggttcaaagtcccacagaaaatttacttcaaatacggctgcctgcgtttcgcgctgaaagaactgaaagacatgaacaaaaagcgtgcgttcattgttaccgacaaagacctgttcaaactgggttacgtgaacaaaatcaccaaagttctggatgaaattgacatcaagtactccatcttcactgatatcaaatccgacccaacgattgatagcgtgaaaaagggcgctaaagaaatgctgaactttgaaccggacaccatcatcagcatcggtggtggctctcctatggatgctgcgaaggtcatgcacctgctgtacgaatacccggaagcggaaatcgaaaacctggctatcaacttcatggacatccgcaaacgtatctgcaacttcccgaagctgggcactaaagctatttccgttgccatcccgactaccgcgggcactggttccgaagccacgccgttcgccgtgatcaccaacgatgaaaccggtatgaaatacccgctgacctcttacgaactgaccccgaacatggcaattatcgacaccgagctgatgctgaacatgccgcgcaagctgaccgctgctaccggcatcgacgctctggtacatgctattgaggcgtacgtttccgtgatggctaccgattacaccgacgaactggccctgcgtgcgatcaaaatgattttcaagtacctgcctcgcgcttacaaaaacggcacgaatgacatcgaggcgcgtgagaaaatggcccatgcaagcaacatcgcgggcatggccttcgccaacgcgttcctgggcgtgtgccactctatggctcacaaactgggtgctatgcaccacgtgccgcacggtatcgcgtgtgctgtcctgatcgaagaagtaattaagtacaacgctactgattgcccgactaaacagaccgccttcccacagtacaaatctcctaacgctaaacgtaagtacgctgagatcgccgaatacctgaacctgaagggtacgagcgacactgagaaagttactgcgctgatcgaagctatctctaaactgaaaattgacctgtccatcccgcagaacatcagcgccgcaggcatcaacaaaaaggacttttacaacacgctggacaaaatgagcgaactggcttttgacgaccagtgcaccactgcaaacccgcgttacccgctgatctctgagctgaaagacatttatatcaaatctttt

SEQ ID NO: 230 - DNA, 2573 bp, Artificial Sequence
  Synthetic Construct
atgaaagtgacgaaccaaaaagaactgaaacaaaaactgaatgaactgcgtgaggcccagaaaaagttcgctacgatgacccaggagcaagttgagaagatcttcaaacagtgtgccattgcggctgccaaactgcgtattaacttggccaaactggcggtggaagaaaccggcatcggtctggtcgaggacaagattatcaagaatcactttgccgcggagtatatctacaacaaatacaaaaacgaaaagacttgcggcatcattgatcatgatgacagcttgggtatcacgaaagtcgcagaaccaatcggtattgtcgcggcaattgtcccgaccactaatccgaccagcaccgcgatcttcaagagcttgatcagcctgaaaacccgcaacgcgattttcttcagcccgcacccgcgtgcgaagaagagcaccatcgcagcggcgaagctgattttggatgccgcggttaaggccggtgcaccgaaaaacattattggctggattgacgagccgagcattgagctgtctcaggacctgatgagcgaagcggacattattctggccaccggtggtccgtctatggttaaggcagcgtactccagcggtaagcctgctatcggcgttggtgcgggcaatacgccggctatcatcgatgaaagcgcggatattgatatggcagttagctccatcattctgtccaaaacctacgacaatggtgttatctgtgcaagcgagcaaagcatcctggtgatgaatagcatttacgagaaggtcaaaaaagagtttgttaagcgtggttcctatattctgaaccagaacgagattgcaaaaatcaaagaaacgatgtttaagaatggcgcgattaatgcagatattgttggtaagtccgcatacattatcgcgaagatggcgggtatcgaagtgccgcaatacaccaaaatcttgatcggcgaagtgcagagcgtggagaagagcgaactgttcagccatgagaaactgagcccggttctggctatgtacaaagtgaaggactttgacgaagccctgaagaaagctcagcgtctgattgagctgggcggcagcggtcacacgagcagcctgtatatcgatagccaaaacaataaggacaaggtgaaagagttcggtctggcgatgaaaacctctcgcacgtttatcaacatgccgagcagccaaggtgcgagcggcgatctgtataacttcgcaatcgcgccttcttttacgctgggttgcggtacctggggcggtaattcggtgagccagaatgtcgagccgaagcacctgctgaacatcaaatcggtcgcggagcgccgtgagaagagacctggttcaaagtcccacagaaaatttacttcaaatacggctgcctgcgtttcgcgctgaaagaactgaaagacatgaacaaaaagcgtgcgttcattgttaccgacaaagacctgttcaaactgggttacgtgaacaaaatcaccaaagttctggatgaaattgacatcaagtactccatcttcactgatatcaaatccgacccaacgattgatagcgtgaaaaagggcgctaaagaaatgctgaactttgaaccggacaccatcatcagcatcggtggtggctctcctatggatgctgcgaaggtcatgcacctgctgtacgaatacccggaagcggaaatcgaaaacctggctatcaacttcatggacatccgcaaacgtatctgcaacttcccgaagctgggcactaaagctatttccgttgccatcccgactaccgcgggcactggttccgaagccacgccgttcgccgtgatcaccaacgatgaaaccggtatgaaatacccgctgacctcttacgaactgaccccgaacatggcaattatcgacaccgagctgatgctgaacatgccgcgcaagctgaccgctgctaccggcatcgacgctctggtacatgctattgaggcgtacgtttccgtgatggctaccgattacaccgacgaactggccctgcgtgcgatcaaaatgattttcaagtacctgcctcgcgcttacaaaaacggcacgaatgacatcgaggcgcgtgagaaaatggcccatgcaagcaacatcgcgggcatggccttcgccaacgcgttcctgggcgtgtgccactctatggctcacaaactgggtgctatgcaccacgtgccgcacggtatcgcgtgtgctgtcctgatcgaagaagtaattaagtacaacgctactgattgcccgactaaacagaccgccttcccacagtacaaatctcctaacgctaaacgtaagtacgctgagatcgccgaatacctgaacctgaagggtacgagcgacactgagaaagttactgcgctgatcgaagctatctctaaactgaaaattgacctgtccatcccgcagaacatcagcgccgcaggcatcaacaaaaaggacttttacaacacgctggacaaaatgagcgaactggcttttgacgaccagtgcaccactgcaaacccgcgttacccgctgatctctgagctgaaagacatttatatcaaatctttt

SEQ ID NO: 231 - DNA, 2573 bp, Artificial Sequence
  Synthetic Construct
atgaaagtgacgaaccaaaaagaactgaaacaaaaactgaatgaactgcgtgaggcccagaaaaagttcgcttgcatgacccaggagcaagttgacaagatcttcaaacagtgtgccattgcggctgccaaagagcgtattaacttggccaaactggcggtggaagaaaccggcatcggtctggtcgaggacaagattatcaagaatcactttgccgcggagtatatctacaacaaatacaaaaacgaaaagacttgcggcatcattgatcatgatgacagcttgggtatcacgaaagtcgcagaaccaatcggtattgtcgcggcaattgtcccgaccactaatccgaccagcaccgcgatcttcaagagcttgatcagcctgaaaacccgcaacgcgattttcttcagcccgcacccgcgtgcgaagaagagcaccatcgcagcggcgaagctgattttggatgccgcggttaaggccggtgcaccgaaaaacattattggctggattgacgagccgagcattgagctgtctcaggacctgatgagcgaagcggacattattctggccaccggtggtccgtctatggttaaggcagcgtactccagcggtaagaaagctatcggcgttggtgcgggcaatacgccggctatcatcgatgaaagcgcggatattgatatggcagttagctccatcattctgtccaaaacctacgacaatggtgttatctgtgcaagcgagcaaagcatcctggtgatgaatagcatttacgagaaggtcaaagaagagtttgttaagcgtggttcctatattctgaaccagaacgagattgcaaaaatcaaagaaacgatgtttaagaatggcgcgattaatgcagatattgttggtaagtccgcatacattatcgcgaagatggcgggtatcgaagtgccgcaaaccaccaaaatcttgatcggcgaagtgcagagcgtggagaagagcgaactgttcagccatgagaaactgagcccggttctggctatgtacaaagtgaaggactttgacgaagccctgaagctggctcagcgtctgattgagctgggcggcagcggtcacacgagcagcctgtatatcgatagccaaaacaataaggacaaggtgaaagagttcggtctggcgatgaaaacctctatcacgtttatcaacatgccgagcagccaaggtgcgagcggcgatctgtataacttcgcaatcgcgccttcttttacgctgggttgcggtacctggggcggtaattcggtgagccagaatgtcgagccgaagcacctgctgaacatcaaatcggtcgcggagcgccgtgagaagagacctggttcaaagtcccacagaaaatttacttcaaatacggctgcctgcgtttcgcgctgaaagaactgaaagacatgaacaaaaagcgtgcgttcattgttaccgacaaagacctgttcaaactgggttacgtgaacaaaatcaccaaagttctggatgaaattgacatcaagtactccatcttcactgatatcaaatccgacccaacgattgatagcgtgaaaaagggcgctaaagaaatgctgaactttgaaccggacaccatcatcagcatcggtggtggctctcctatggatgctgcgaaggtcatgcacctgctgtacgaatacccggaagcggaaatcgaaaacctggctatcaacttcatggacatccgcaaacgtatctgcaacttcccgaagctgggcactaaagctatttccgttgccatcccgactaccgcgggcactggttccgaagccacgccgttcgccgtgatcaccaacgatgaaaccggtatgaaatacccgctgacctcttacgaactgaccccgaacatggcaattatcgacaccgagctgatgctgaacatgccgcgcaagctgaccgctgctaccggcatcgacgctctggtacatgctattgaggcgtacgtttccgtgatggctaccgattacaccgacgaactggccctgcgtgcgatcaaaatgattttcaagtacctgcctcgcgcttacaaaaacggcacgaatgacatcgaggcgcgtgagaaaatggcccatgcaagcaacatcgcgggcatggccttcgccaacgcgttcctgggcgtgtgccactctatggctcacaaactgggtgctatgcaccacgtgccgcacggtatcgcgtgtgctgtcctgatcgaagaagtaattaagtacaacgctactgattgcccgactaaacagaccgccttcccacagtacaaatctcctaacgctaaacgtaagtacgctgagatcgccgaatacctgaacctgaagggtacgagcgacactgagaaagttactgcgctgatcgaagctatctctaaactgaaaattgacctgtccatcccgcagaacatcagcgccgcaggcatcaacaaaaaggacttttacaacacgctggacaaaatgagcgaactggcttttgacgaccagtgcaccactgcaaacccgcgttacccgctgatctctgagctgaaagacatttatatcaaatctttt

SEQ ID NO: 232 - DNA, 2573 bp, Artificial Sequence
  Synthetic Construct
atgaaagtgacgaaccaaaaagaactgaaacaaaaactgaatgaactgcgtgaggcccagaaaaagttcgctacgtatacccaggagcaagttgacaagatcttcaaacagtgtgccattgcggctgccaaagagcgtattaacttggccaaactggcggtggaagaaaccggcatcggtctggtcgaggacaagattatcaagaatcactttgccgcggagtatatctacaacaaatacaaaaacgaaaagacttgcggcatcattgatcatgatgacagcttgggtatcacgaaagtcgcagaaccaatcggtattgtcgcggcaattgtcccgaccactaatccgaccagcaccgcgatcttcaagagcttgatcagcctgaaaacccgcaacgcgattttcttcagcccgcacccgcgtgcgaagaagagcaccatcgcagcggcgaagctgattttggatgccgcggttaaggccggtgcaccgaaaaacattattggctggattgacgagccgagcattgagctgtctcaggacctgatgagcgaagcggacattattctggccaccggtggtccgtctatggttaaggcagcgtactccagcggtaagcctgctatcggcgttggtgcgggcaatacgccggctatcatcgatgaaagcgcggatattgatatggcagttagctccatcattctgtccaaaacctacgacaatggtgttatctgtgcaagcgagcaaagcatcctggtgatgaatagcatttacgagaaggtcaaagaagagtttgttaagcgtggttcctatattctgaaccagcaggcgattgcaaaaatcaaagaaacgatgtttaagaatggcgcgattaatgcagatattgttggtaagtccgcatacattatcgcgaagatggcgggtatcgaagtgccgcaatacaccaaaatcttgatcggcgaagtgcagagcgtggagaagagcgaactgttcagccatgagaaactgagcccggttctggctatgtacaaagtgaaggactttgacgaagccctgaagaaagctgagcgtctgattgagctgggcggcagcggtcacacgagcagcctgtatagcgatagccaaaacaataaggacaaggtgaaagagttcggtctggcgatgaaaacctctcgcacgtttatcaacatgccgagcagccaaggtgcgagcggcgatctgtataacttcgcaatcgcgccttcttttacgctgggttgcggtacctggggcggtaattcggtgagccagaatgtcgagccgaagcacctgctgaacatcaaatcggtcgcggagcgccgtgagaagagacctggttcaaagtcccacagaaaatttacttcaaatacggctgcctgcgtttcgcgctgaaagaactgaaagacatgaacaaaaagcgtgcgttcattgttaccgacaaagacctgttcaaactgggttacgtgaacaaaatcaccaaagttctggatgaaattgacatcaagtactccatcttcactgatatcaaatccgacccaacgattgatagcgtgaaaaagggcgctaaagaaatgctgaactttgaaccggacaccatcatcagcatcggtggtggctctcctatggatgctgcgaaggtcatgcacctgctgtacgaatacccggaagcggaaatcgaaaacctggctatcaacttcatggacatccgcaaacgtatctgcaacttcccgaagctgggcactaaagctatttccgttgccatcccgactaccgcgggcactggttccgaagccacgccgttcgccgtgatcaccaacgatgaaaccggtatgaaatacccgctgacctcttacgaactgaccccgaacatggcaattatcgacaccgagctgatgctgaacatgccgcgcaagctgaccgctgctaccggcatcgacgctctggtacatgctattgaggcgtacgtttccgtgatggctaccgattacaccgacgaactggccctgcgtgcgatcaaaatgattttcaagtacctgcctcgcgcttacaaaaacggcacgaatgacatcgaggcgcgtgagaaaatggcccatgcaagcaacatcgcgggcatggccttcgccaacgcgttcctgggcgtgtgccactctatggctcacaaactgggtgctatgcaccacgtgccgcacggtatcgcgtgtgctgtcctgatcgaagaagtaattaagtacaacgctactgattgcccgactaaacagaccgccttcccacagtacaaatctcctaacgctaaacgtaagtacgctgagatcgccgaatacctgaacctgaagggtacgagcgacactgagaaagttactgcgctgatcgaagctatctctaaactgaaaattgacctgtccatcccgcagaacatcagcgccgcaggcatcaacaaaaaggacttttacaacacgctggacaaaatgagcgaactggcttttgacgaccagtgcaccactgcaaacccgcgttacccgctgatctctgagctgaaagacatttatatcaaatctttt

SEQ ID NO: 233 - DNA, 2573 bp, Artificial Sequence
  Synthetic Construct
atgaaagtgacgaaccaaaaagaactgaaacaaaaactgaatgaactgcgtgaggcccagaaaaagttcgctacgtatacccaggcgcaagttgacaagatcttcaaacagtgtgccattgcggctgccaaagagcgtattaacttggccaaactggcggtggaagaaaccggcatcggtctggtcgaggacaagattatcaagaatcactttgccgcggagtatatctacaacaaatacaaaaacgaaaagacttgcggcatcattgatcatgatgacagcttgggtatcacgaaagtcgcagaaccaatcggtattgtcgcggcaattgtcccgaccactaatccgaccagcaccgcgatcttcaagagcttgatcagcctgaaaacccgcaacgcgattttcttcagcccgcacccgcgtgcgaagaagagcaccatcgcagcggcgaagctgattttggatgccgcggttaaggccggtgcaccgaaaaacattattggctggattgacgagccgagcattgagctgtctcaggacctgatgagcgaagcggacattattctggccaccggtggtccgtctatggttaaggcagcgtactccagcggtaagcctgctatcggcgcgggtgcgggcaatacgccggctatcatcgatgaaagcgcggatattgatatggcagttagctccatcattctgtccaaaacctacgacaataacgttatctgtgcaagcgagcaaagcatcctggtgatgaatagcatttacgagaaggtcaaaaaagagtttgttaagcgtggttcctatattctgaaccagaacgagattgcaaaaatcaaagaaacgatgtttaagaatggcgcgattaatgcagatattgttggtaagtccgcatacattatcgcgaagatggcgggtatcgaagtgccgcaaaccaccaaaatcttgatcggcgaagtgcagcacgtggagaagagcgaactgttcagccatgagaaactgagcccggttctggctatgtacaaagtgaaggactttgacgaagccctgaagaaagctcagcgtctgattgagctgggcggcagcggtcacacgagcagcctgtatatcgatagccaaaacaataaggacaaggtgaaagagttcggtctggcgatgaaaacctctcgcacgtttatcaacatgccgagcagccaaggtgcgagcggcgatctgtataacttcgcaatcgcgccttcttttacgctgggttgcggtacctggggcggtaattcggtgagccagaatgtcgagccgaagcacctgctgaacatcaaatcggtcgcggagcgccgtgagaagagacctggttcaaagtcccacagaaaatttacttcaaatacggctgcctgcgtttcgcgctgaaagaactgaaagacatgaacaaaaagcgtgcgttcattgttaccgacaaagacctgttcaaactgggttacgtgaacaaaatcaccaaagttctggatgaaattgacatcaagtactccatcttcactgatatcaaatccgacccaacgattgatagcgtgaaaaagggcgctaaagaaatgctgaactttgaaccggacaccatcatcagcatcggtggtggctctcctatggatgctgcgaaggtcatgcacctgctgtacgaatacccggaagcggaaatcgaaaacctggctatcaacttcatggacatccgcaaacgtatctgcaacttcccgaagctgggcactaaagctatttccgttgccatcccgactaccgcgggcactggttccgaagccacgccgttcgccgtgatcaccaacgatgaaaccggtatgaaatacccgctgacctcttacgaactgaccccgaacatggcaattatcgacaccgagctgatgctgaacatgccgcgcaagctgaccgctgctaccggcatcgacgctctggtacatgctattgaggcgtacgtttccgtgatggctaccgattacaccgacgaactggccctgcgtgcgatcaaaatgattttcaagtacctgcctcgcgcttacaaaaacggcacgaatgacatcgaggcgcgtgagaaaatggcccatgcaagcaacatcgcgggcatggccttcgccaacgcgttcctgggcgtgtgccactctatggctcacaaactgggtgctatgcaccacgtgccgcacggtatcgcgtgtgctgtcctgatcgaagaagtaattaagtacaacgctactgattgcccgactaaacagaccgccttcccacagtacaaatctcctaacgctaaacgtaagtacgctgagatcgccgaatacctgaacctgaagggtacgagcgacactgagaaagttactgcgctgatcgaagctatctctaaactgaaaattgacctgtccatcccgcagaacatcagcgccgcaggcatcaacaaaaaggacttttacaacacgctggacaaaatgagcgaactggcttttgacgaccagtgcaccactgcaaacccgcgttacccgctgatctctgagctgaaagacatttatatcaaatctttt

SEQ ID NO: 234 - DNA, 2573 bp, Artificial Sequence
  Synthetic Construct
atgaaagtgacgaaccaaaaagaactgaaacaaaaactgaatgaactgcgtgaggcccagaaaaagttcgctagctatacccaggcgcaagttgacaagatcttcaaacagtgtgccattgcggctgccaaagagcgtattaacttggccaaactggcggtggaagaaaccggcatcggtctggtcgaggacaagattatcaagaatcactttgccgcggagtatatctacaacaaatacaaaaaccacaagacttgcggcatcattgatcatgatgacagcttgggtatcacgaaagtcgcagaaccaatcggtattgtcgcggcaattgtcccgaccactaatccgaccagcaccgcgatcttcaagagcttgatcagcctgaaaacccgcaacgcgattttcttcagcccgcacccgcgtgcgaagaagagcaccatcgcagcggcgaagctgattttggatgccgcggttaaggccggtgcaccgaaaaacattattggctggattgacgagccgagcattgagctgtctcaggacctgatgagcgaagcggacattattctggccaccggtggtccgtctatggttaaggcagcgtactccagcggtaagcctgctatcggcgttggtgcgggcaatacgccggctatcatcgatgaaagcgcggatattgatatggcagttagctccatcattctgtccaaaacctacgacaatggtgttatctgtgcaagcgagcaaagcatcctggtgatgaatagcatttacgagaaggtcaaagaagagtttgttaagcgtggttcctatattctgaaccagaacgagattgcaaaaatcaaagaaacgatgtttaagaatggcgcgattaatgcagatattgttggtaagtccgcatacattatcgcgaagatggcgggtatcgaagtgccgcaaaccaccaaaatcttgatcggcgaagtgcagagcgtggagaagagcgaactgttcagcgttgagaaactgagcccggttctggctatgtacaaagtgaaggactttgacgaagccctgaagaaagctcagcgtctgattgagctgggcggcagcggtcacacgagcagcctgtatatcgatagccaaaacaataaggacaaggtgaaagagttcggtctgcgtatgaaaacctctcgcacgtttatcaacatgccgagcagccaaggtgcgagcggcgatctgtataacttcgcaatcgcgccttcttttacgctgggttgcggtacctggggcggtaattcggtgagccagaatgtcgagccgaagcacctgctgaacatcaaatcggtcgcggagcgccgtgagaagagacctggttcaaagtcccacagaaaatttacttcaaatacggctgcctgcgtttcgcgctgaaagaactgaaagacatgaacaaaaagcgtgcgttcattgttaccgacaaagacctgttcaaactgggttacgtgaacaaaatcaccaaagttctggatgaaattgacatcaagtactccatcttcactgatatcaaatccgacccaacgattgatagcgtgaaaaagggcgctaaagaaatgctgaactttgaaccggacaccatcatcagcatcggtggtggctctcctatggatgctgcgaaggtcatgcacctgctgtacgaatacccggaagcggaaatcgaaaacctggctatcaacttcatggacatccgcaaacgtatctgcaacttcccgaagctgggcactaaagctatttccgttgccatcccgactaccgcgggcactggttccgaagccacgccgttcgccgtgatcaccaacgatgaaaccggtatgaaatacccgctgacctcttacgaactgaccccgaacatggcaattatcgacaccgagctgatgctgaacatgccgcgcaagctgaccgctgctaccggcatcgacgctctggtacatgctattgaggcgtacgtttccgtgatggctaccgattacaccgacgaactggccctgcgtgcgatcaaaatgattttcaagtacctgcctcgcgcttacaaaaacggcacgaatgacatcgaggcgcgtgagaaaatggcccatgcaagcaacatcgcgggcatggccttcgccaacgcgttcctgggcgtgtgccactctatggctcacaaactgggtgctatgcaccacgtgccgcacggtatcgcgtgtgctgtcctgatcgaagaagtaattaagtacaacgctactgattgcccgactaaacagaccgccttcccacagtacaaatctcctaacgctaaacgtaagtacgctgagatcgccgaatacctgaacctgaagggtacgagcgacactgagaaagttactgcgctgatcgaagctatctctaaactgaaaattgacctgtccatcccgcagaacatcagcgccgcaggcatcaacaaaaaggacttttacaacacgctggacaaaatgagcgaactggcttttgacgaccagtgcaccactgcaaacccgcgttacccgctgatctctgagctgaaagacatttatatcaaatctttt

SEQ ID NO: 235 - DNA, 2573 bp, Artificial Sequence
  Synthetic Construct
atgaaagtgacgaaccaaaaagaactgaaacaaaaactgaatgaactgcgtgaggcccagaaaaagttcgctacgtatacccaggaccaagttgacaagatcttcaaacagtgtgccattgcggctgccaaagagcgtattaacttggccaaactggcggtggaagaaaccggcatcggtctggtcgaggacaagattatcaagaatcactttgccgcggagtatatctacaacaaatacaaaaacgaaaagacttgcggcatcattgatcatgatgacagcttgggtatcacgaaagtcgcagaaccaatcggtattgtcgcggcaattgtcccgaccactaatccgaccagcaccgcgatcttcaagagcttgatcagcctgaaaacccgcaacgcgattttcttcagcccgcacccgcgtgcgaagaagagcaccatcgcagcggcgaagctgattttggatgccgcggttaaggccggtgcaccgaaaaacattattggctggattgacgagccgagcattgagctgtctcaggacctgatgagcgaagcggacattattctggccaccggtggtccgtctatggttaaggcagcgtactccagcggtaagcctgctatcggcgttggtgcgggcaatacgccggctatcatcgatgaaagcgcggatattgatatggcagttagctccatcattctgtccaaaacctacgacaataacgttatctgtgcaagcgagcaaagcatcctggtgatgaatagcatttacgagaaggtcaaagaagagtttgttaagcgtggttcctatattctgaaccagaacgagattgcaaaaatcaaagaaacgatgtttaagaatggcgcgattaatgcagatattgttggtaagtccgcatacattatcgcgaagatggcgggtatcgaagtgccgcaaaccaccaaaatcttgatcggcgaagtgcagagcgtggaggcgagcgaactgttcagccatgagaaactgagcccggttctggctatgtacaaagtgaaggactttgacgaagccctgaagaaagctcagcgtctgattgagctgggcggcagcggtcacacgagcagcctgtatatcgatagccaaaacaataaggacaaggtgaaagagttcggtctggcgatgaaaacctctatcacgtttatcaacatgccgagcagccaaggtgcgagcggcgatctgtataacttcgcaatcgcgccttcttttacgctgggttgcggtacctgggagggtaattcggtgagccagaatgtcgagccgaagcacctgctgaacatcaaatcggtcgcggagcgccgtgagaagagacctggttcaaagtcccacagaaaatttacttcaaatacggctgcctgcgtttcgcgctgaaagaactgaaagacatgaacaaaaagcgtgcgttcattgttaccgacaaagacctgttcaaactgggttacgtgaacaaaatcaccaaagttctggatgaaattgacatcaagtactccatcttcactgatatcaaatccgacccaacgattgatagcgtgaaaaagggcgctaaagaaatgctgaactttgaaccggacaccatcatcagcatcggtggtggctctcctatggatgctgcgaaggtcatgcacctgctgtacgaatacccggaagcggaaatcgaaaacctggctatcaacttcatggacatccgcaaacgtatctgcaacttcccgaagctgggcactaaagctatttccgttgccatcccgactaccgcgggcactggttccgaagccacgccgttcgccgtgatcaccaacgatgaaaccggtatgaaatacccgctgacctcttacgaactgaccccgaacatggcaattatcgacaccgagctgatgctgaacatgccgcgcaagctgaccgctgctaccggcatcgacgctctggtacatgctattgaggcgtacgtttccgtgatggctaccgattacaccgacgaactggccctgcgtgcgatcaaaatgattttcaagtacctgcctcgcgcttacaaaaacggcacgaatgacatcgaggcgcgtgagaaaatggcccatgcaagcaacatcgcgggcatggccttcgccaacgcgttcctgggcgtgtgccactctatggctcacaaactgggtgctatgcaccacgtgccgcacggtatcgcgtgtgctgtcctgatcgaagaagtaattaagtacaacgctactgattgcccgactaaacagaccgccttcccacagtacaaatctcctaacgctaaacgtaagtacgctgagatcgccgaatacctgaacctgaagggtacgagcgacactgagaaagttactgcgctgatcgaagctatctctaaactgaaaattgacctgtccatcccgcagaacatcagcgccgcaggcatcaacaaaaaggacttttacaacacgctggacaaaatgagcgaactggcttttgacgaccagtgcaccactgcaaacccgcgttacccgctgatctctgagctgaaagacatttatatcaaatctttt

SEQ ID NO: 236 - DNA, 2573 bp, Artificial Sequence
  Synthetic Construct
atgaaagtgacgaaccaaaaagaactgaaacaaaaactgaatgaactgcgtgaggcccagaaaaagttcgctacgtatacccaggagcaagttgacaagatcttcaaacagtgtgccattgcggctgccaaagagcgtattaacttggccaaactggcggtggaagaaaccggcatcggtctggtcgaggacaagattatcaagaatcactttgccgcggagtatatctacaacaaatacaaaaacgaaaagacttgcggcatcattgatcatgatgacagcttgggtatcacgaaagtcgcagaaccaatcggtattgtcgcggcaattgtcccgaccactaatccgaccagcaccgcgatcttcaagagcttgatcagcctgaaaacccgcaacgcgattttcttcagcccgcacccgcgtgcgaagaagagcaccatcgcagcggcgaccctgattttggatgccgcggttaaggccggtgcaccgaaaaacattattggctggattgacgagccgagcattgagctgtctcaggacctgatgagcgaagcggacattattctggccaccggtggtccgtctatggttaaggcagcgtactccagcggtaagcctgctatcggcgttggtgcgggcaatacgccggctatcatcgatgaaagcgcggatattgatatggcagttagctccatcattctgggtaaaacctacgacaatggtgttatctgtgcaagcgagcaaagcatcctggtgatgaatagcatttacgagaaggtcaaagaagagtttgttaagcgtggttcctatattctgaaccagaacgagattgcaaaaatcaaagaaacgatgtttaagaatggcgcgattaatgcagatattgttggtaagtccgcatacattatcgcgaagatggcgggtatcgaagtgccgcaaaccaccaaaatcttgatcggcgaagtgcagagcgtggagaagagcgaactgttcagccatgagctgctgagcccggttctggctatgtacaaagtgaaggactttgacgaagccctgaagaaagctcagcgtctgattgagctgggcggcagccaccacacgagcagcctgtatatcgatagccaaaacaataaggacaaggtgaaagagttcggtctggagatgaaaacctctcgcacgtttatcaacatgccgagcagccaaggtgcgagcggcgatctgtataacttcgcaatcgcgccttcttttacgctgggttgcggtacctggggcggtaattcggtgagccagaatgtcgagccgaagcacctgctgaacatcaaatcggtcgcggagcgccgtgagaagagacctggttcaaagtcccacagaaaatttacttcaaatacggctgcctgcgtttcgcgctgaaagaactgaaagacatgaacaaaaagcgtgcgttcattgttaccgacaaagacctgttcaaactgggttacgtgaacaaaatcaccaaagttctggatgaaattgacatcaagtactccatcttcactgatatcaaatccgacccaacgattgatagcgtgaaaaagggcgctaaagaaatgctgaactttgaaccggacaccatcatcagcatcggtggtggctctcctatggatgctgcgaaggtcatgcacctgctgtacgaatacccggaagcggaaatcgaaaacctggctatcaacttcatggacatccgcaaacgtatctgcaacttcccgaagctgggcactaaagctatttccgttgccatcccgactaccgcgggcactggttccgaagccacgccgttcgccgtgatcaccaacgatgaaaccggtatgaaatacccgctgacctcttacgaactgaccccgaacatggcaattatcgacaccgagctgatgctgaacatgccgcgcaagctgaccgctgctaccggcatcgacgctctggtacatgctattgaggcgtacgtttccgtgatggctaccgattacaccgacgaactggccctgcgtgcgatcaaaatgattttcaagtacctgcctcgcgcttacaaaaacggcacgaatgacatcgaggcgcgtgagaaaatggcccatgcaagcaacatcgcgggcatggccttcgccaacgcgttcctgggcgtgtgccactctatggctcacaaactgggtgctatgcaccacgtgccgcacggtatcgcgtgtgctgtcctgatcgaagaagtaattaagtacaacgctactgattgcccgactaaacagaccgccttcccacagtacaaatctcctaacgctaaacgtaagtacgctgagatcgccgaatacctgaacctgaagggtacgagcgacactgagaaagttactgcgctgatcgaagctatctctaaactgaaaattgacctgtccatcccgcagaacatcagcgccgcaggcatcaacaaaaaggacttttacaacacgctggacaaaatgagcgaactggcttttgacgaccagtgcaccactgcaaacccgcgttacccgctgatctctgagctgaaagacatttatatcaaatctttt

SEQ ID NO: 237 - DNA, 2573 bp, Artificial Sequence
  Synthetic Construct
atgaaagtgacgaaccaaaaagaactgaaacaaaaactgaatgaactgcgtgaggcccagaaaaagttcgctacgtatacccaggagcaagttgagaagttcttcaaacagtgtgccattgcggctgccaaagagcgtattaacttggccaaactggcggtggaagaaaccggcatcggtctggtcgaggacaagattatcaagaatcactttgccgcggagtatatctacaacaaatacaaaaacgaaaagacttgcggcatcattgatcatgatgacagcttgggtatcacgaaagtcgcagaaccaatcggtattgtcgcgagcattgtcccgaccactaatccgaccagcaccgcgatcttcaagagcttgatcagcctgaaaacccgcaacgcgattttcttcagcccgcacccgcgtgcgaagaagagcaccatcgcagcggcgaagctgattttggatgccgcggttaaggccggtgcaccgaaaaacattattggctggattgacgagccgagcattgagctgtctcaggacctgatgagcgaagcggacattattctggccaccggtggtccgtctatggttaaggcagcgtactccagcggtaagcctgctatcggcgttggtgcgggcaatacgccggctatcatcgatgaaagcgcggatattgatatggcagttagctccatcattctgtccaaaacctacgacaatggtgttatctgtgcaagcgagcaaagcatcctggtgatgaatagcatttacgagaaggtcaaagaagagtttgttaagcgtggttcctatattctgaaccagaacgagattgcaaaaatcaaagaaacgatgtttaagaatggcgcgattaatgcagatattgttggtaagtccgcatacattatcgcgaagatggcgggtatcgaagtgccgcaaaccaccaaaatcttgatcggcgaagtgcagagcgtggagaagagcgaactgttcagccatgagaaactgagcccggttctggctatgtacaaagtgaaggactttgacgaagccctgaagaaagctcagcgtctgattgagctgggcggcagcggtcacacgagcagcctgtatatcgatagccaaaacaataaggacaaggtgaaagagttcggtctggcgatgaaaacctctcgcacgtttatcaacatgccgagcagccaaggtgcgagcggcgatctgtataacttcgcaatcgcgccttcttttacgctgggttgcccgacctggggcggtaattcggtgagccagaatgtcgagccgaagcacctgctgaacatcaaatcggtcgcgcgtcgccgtgagaagagacctggttcaaagtcccacagaaaatttacttcaaatacggctgcctgcgtttcgcgctgaaagaactgaaagacatgaacaaaaagcgtgcgttcattgttaccgacaaagacctgttcaaactgggttacgtgaacaaaatcaccaaagttctggatgaaattgacatcaagtactccatcttcactgatatcaaatccgacccaacgattgatagcgtgaaaaagggcgctaaagaaatgctgaactttgaaccggacaccatcatcagcatcggtggtggctctcctatggatgctgcgaaggtcatgcacctgctgtacgaatacccggaagcggaaatcgaaaacctggctatcaacttcatggacatccgcaaacgtatctgcaacttcccgaagctgggcactaaagctatttccgttgccatcccgactaccgcgggcactggttccgaagccacgccgttcgccgtgatcaccaacgatgaaaccggtatgaaatacccgctgacctcttacgaactgaccccgaacatggcaattatcgacaccgagctgatgctgaacatgccgcgcaagctgaccgctgctaccggcatcgacgctctggtacatgctattgaggcgtacgtttccgtgatggctaccgattacaccgacgaactggccctgcgtgcgatcaaaatgattttcaagtacctgcctcgcgcttacaaaaacggcacgaatgacatcgaggcgcgtgagaaaatggcccatgcaagcaacatcgcgggcatggccttcgccaacgcgttcctgggcgtgtgccactctatggctcacaaactgggtgctatgcaccacgtgccgcacggtatcgcgtgtgctgtcctgatcgaagaagtaattaagtacaacgctactgattgcccgactaaacagaccgccttcccacagtacaaatctcctaacgctaaacgtaagtacgctgagatcgccgaatacctgaacctgaagggtacgagcgacactgagaaagttactgcgctgatcgaagctatctctaaactgaaaattgacctgtccatcccgcagaacatcagcgccgcaggcatcaacaaaaaggacttttacaacacgctggacaaaatgagcgaactggcttttgacgaccagtgcaccactgcaaacccgcgttacccgctgatctctgagctgaaagacatttatatcaaatctttt

SEQ ID NO: 238 - DNA, 2573 bp, Artificial Sequence
  Synthetic Construct
atgaaagtgacgaaccaaaaagaactgaaacaaaaactgaatgaactgcgtgaggcccagaaaaagttcgctacgtatacccaggagcaagttgacaagatcttcaaacagtgtgccattgcggctgccaaagagcgtattaacttggccaaactggcggtggaagaaaccggcatcggtctggtcgaggacaagattatcaagaatcactttgccgcggagtatatctacaacaaatacaaaaacgaaaagacttgcggcatcattgatcatgatgacagcttgggtatcacgaaagtcgcagaaccaatcggtattgtcgcggcaattgtcccgaccactaatccgaccagcaccgcgatcttcaagagcttgatcagcctgaaaacccgcaacgcgattttcttcagcccgcacccgcgtgcgaagaagagcaccatcgcagcggcgaagctgattttggatgccgcggttaaggccggtgcaccgaaaaacattattggctggattgacgagccgagcattgagctgtctcaggacctgatgagcgaagcggacattattctggccaccggtggtccgtctatggttaaggcagcgtactccagcggtaagcctgctatcggcgttggtgcgggcaatacgccggctatcatcgatgaaagcgcggatattgatatggcagttagctccatcattctgtccaaaacctacgacaatggtgttatctgtgcaagcgagcaaagcatcctggtgatgaatagcatttacgagaaggtcaaagaagagtttgttaagcgtggttcctatattctgaaccagcaggagattgcaaaaatcaaagaaacgatgtttaagaatggcgcgattaatgcagatattgttggtaagtccgcatacattatcgcgaagatggcgggtatcgaagtgccgcaaaccaccaaaatcttgatcggcgaagtgcagagcgtggagaagagcgaactgttcagcaaagagaaactgagcccggttctggctatgtacaaagtgaaggactttgacgaagccctgaagaaagctcagcgtctgattgagctgggcggcagccaccacacgagcagcctgtatatcgatagccaaaacaataaggacaaggtgaaagagttcggtctgcgtatgaaaacctctcgcttctttatcaacatgccgagcagccaaggtgcgagcggcgatctgtataacttcgcaatcgcgccttcttttacgctgggttgcggtacctggggcggtaattcggtgagccagaatgtcgagccgaagcacctgctgaacatcaaatcggtcgcggagcgccgtgagaagagacctggttcaaagtcccacagaaaatttacttcaaatacggctgcctgcgtttcgcgctgaaagaactgaaagacatgaacaaaaagcgtgcgttcattgttaccgacaaagacctgttcaaactgggttacgtgaacaaaatcaccaaagttctggatgaaattgacatcaagtactccatcttcactgatatcaaatccgacccaacgattgatagcgtgaaaaagggcgctaaagaaatgctgaactttgaaccggacaccatcatcagcatcggtggtggctctcctatggatgctgcgaaggtcatgcacctgctgtacgaatacccggaagcggaaatcgaaaacctggctatcaacttcatggacatccgcaaacgtatctgcaacttcccgaagctgggcactaaagctatttccgttgccatcccgactaccgcgggcactggttccgaagccacgccgttcgccgtgatcaccaacgatgaaaccggtatgaaatacccgctgacctcttacgaactgaccccgaacatggcaattatcgacaccgagctgatgctgaacatgccgcgcaagctgaccgctgctaccggcatcgacgctctggtacatgctattgaggcgtacgtttccgtgatggctaccgattacaccgacgaactggccctgcgtgcgatcaaaatgattttcaagtacctgcctcgcgcttacaaaaacggcacgaatgacatcgaggcgcgtgagaaaatggcccatgcaagcaacatcgcgggcatggccttcgccaacgcgttcctgggcgtgtgccactctatggctcacaaactgggtgctatgcaccacgtgccgcacggtatcgcgtgtgctgtcctgatcgaagaagtaattaagtacaacgctactgattgcccgactaaacagaccgccttcccacagtacaaatctcctaacgctaaacgtaagtacgctgagatcgccgaatacctgaacctgaagggtacgagcgacactgagaaagttactgcgctgatcgaagctatctctaaactgaaaattgacctgtccatcccgcagaacatcagcgccgcaggcatcaacaaaaaggacttttacaacacgctggacaaaatgagcgaactggcttttgacgaccagtgcaccactgcaaacccgcgttacccgctgatctctgagctgaaagacatttatatcaaatctttt

SEQ ID NO: 239 - DNA, 2573 bp, Artificial Sequence
  Synthetic Construct
atgaaagtgacgaaccaaaaagaactgaaacaaaaactgaatgaactgcgtgaggcccagaaaaagttcaacacgtatacccaggagcaagttgacaagatcttcaaacagtgtgccattgcggctgccaaagagcgtattaacttggccaaactggcggtggaagaaaccggcatcggtctggtcgaggacaagattatcaagaatcactttgccgcggagtatatctacaacaaatacaaaaacgaaaagacttgcggcatcattgatcatgatgacagcttgggtatcacgaaagtcgcagaaccaatcggtattgtcgcggcaattgtcccgaccactaatccgaccagcaccgcgatcttcaagagcttgatcagcctgaaaacccgcaacgcgattttcttcagcccgcacccgcgtgcgaagaagagcaccatcgcagcggcgaagctgattttggatgccgcggttaaggccggtgcaccgaaaaacattattggctggattgacgagccgagcattgagctgtctcaggacctgatgaaagaagcggacattattctggccaccggtggtccgtctatggttaaggcagcgtactccagcggtaagcctgctatcggcgttggtgcgggcaatacgccggctatcatcgatgaaagcgcggatattgatatggcagttagctccatcattctgtccaaaacctacgacaatggtgttatctgtgcaagcgagcaaagcatcctggtgatgaatagcatttacgagaaggtcaaagaagagtttgttaagcgtggttcctatattctgaaccagaacgagattgcaaaaatcaaagaaacgatgtttaagaatggcgcgattaatgcagatattgttggtaagtccgcatacattatcgcgaagatggcgggtatcgaagtgccgcaattcaccaaaatcttgatcggcgaagtgcagagcgtggagaagagcgaactgttcagccatgagaaactgagcccggttctggctatgtacaaagtgaaggactttgacgaagccctgaagaaagctcagcgtctgattaacctgggcggcagcggtcacacgagcagcctgtatagcgatagccaaaacaataaggacaaggtgaaagagttcggtctggcgatgaaaacctctcgcacgtttatcaacatgccgagcagccaaggtgcgagcggcgatctgtataacttcgcaatcgcgccttcttttacgctgggttgcggtacctggggcggtaattcggtgagccagaatgtcgagccgaagcacctgctgaacatcaaatcggtcgcggagcgccgtgagaagagacctggttcaaagtcccacagaaaatttacttcaaatacggctgcctgcgtttcgcgctgaaagaactgaaagacatgaacaaaaagcgtgcgttcattgttaccgacaaagacctgttcaaactgggttacgtgaacaaaatcaccaaagttctggatgaaattgacatcaagtactccatcttcactgatatcaaatccgacccaacgattgatagcgtgaaaaagggcgctaaagaaatgctgaactttgaaccggacaccatcatcagcatcggtggtggctctcctatggatgctgcgaaggtcatgcacctgctgtacgaatacccggaagcggaaatcgaaaacctggctatcaacttcatggacatccgcaaacgtatctgcaacttcccgaagctgggcactaaagctatttccgttgccatcccgactaccgcgggcactggttccgaagccacgccgttcgccgtgatcaccaacgatgaaaccggtatgaaatacccgctgacctcttacgaactgaccccgaacatggcaattatcgacaccgagctgatgctgaacatgccgcgcaagctgaccgctgctaccggcatcgacgctctggtacatgctattgaggcgtacgtttccgtgatggctaccgattacaccgacgaactggccctgcgtgcgatcaaaatgattttcaagtacctgcctcgcgcttacaaaaacggcacgaatgacatcgaggcgcgtgagaaaatggcccatgcaagcaacatcgcgggcatggccttcgccaacgcgttcctgggcgtgtgccactctatggctcacaaactgggtgctatgcaccacgtgccgcacggtatcgcgtgtgctgtcctgatcgaagaagtaattaagtacaacgctactgattgcccgactaaacagaccgccttcccacagtacaaatctcctaacgctaaacgtaagtacgctgagatcgccgaatacctgaacctgaagggtacgagcgacactgagaaagttactgcgctgatcgaagctatctctaaactgaaaattgacctgtccatcccgcagaacatcagcgccgcaggcatcaacaaaaaggacttttacaacacgctggacaaaatgagcgaactggcttttgacgaccagtgcaccactgcaaacccgcgttacccgctgatctctgagctgaaagacatttatatcaaatctttt

SEQ ID NO: 240 - DNA, 2573 bp, Artificial Sequence
  Synthetic Construct
atgaaagtgacgaaccaaaaagaactgaaacaaaaagacaatgaactgcgtgaggcccagaaaaagttcgctacgtgcacccaggaccaagttgacaagatcttcaaacagtgtgccattgcggctgccaaagagcgtattaacttggccaaactggcggtggaagaaaccggcatcggtctggtcgaggacaagattatcaagaatcactttgccgcggagtatatctacaacaaatacaaaaacgaaaagacttgcggcatcattgatcatgatgacagcttgggtatcacgaaagtcgcagaaccaatcggtattgtcgcggcaattgtcccgaccactaatccgaccagcaccgcgatcttcaagagcttgatcagcctgaaaacccgcaacgcgattttcttcagcccgcacccgcgtgcgaagaagagcaccatcgcagcggcgaagctgattttggatgccgcggttaaggccggtgcaccgaaaaacattattggctggattgacgagccgagcattgagctgtctcaggacctgatgagcgaagcggacattattctggccaccggtggtccgtctatggttaaggcagcgtactccagcggtaagcctgctatcggcgttggtgcgggcaatacgccggctatcatcgatgaaagcgcggatattgatatggcagttagctccatcattctgggtaaaacctacgacaatggtgttatctgtgcaagcgagcaaagcatcctggtgatgaatagcatttacgagaaggtcaaagaagagtttgttaagcgtggttcctatattctgaaccagaacgagattgcaaaaatcaaagaaacgatgtttaagaatggcgcgattaatgcagatattgttggtaagtccgcatacattatcgcgaagatggcgggtatcgaagtgccgcaaaccaccaaaatcttgatcggcgaagtgcagagcgtggagaagagcgaactgttcagcaaagagaaactgagcccggttctggctatgtacaaagtgaaggactttgacgaagccctgaagaaagctcagcgtctgattgagctgggcggcagcggtcacacgagcagcctgtatatcgatagccaaaacaataaggacaaggtgaaagagttcggtctggcgatgaaaacctctcgcacgtttatcaacatgccgagcagccaaggtgcgagcggcgatctgtataacttcgcaatcgcgccttcttttacgctgggttgcggtacctggggcggtaattcggtgagccagaatgtcgagccgaagcacctgctgaacatcaaatcggtcgcggagcgccgtgagaagagacctggttcaaagtcccacagaaaatttacttcaaatacggctgcctgcgtttcgcgctgaaagaactgaaagacatgaacaaaaagcgtgcgttcattgttaccgacaaagacctgttcaaactgggttacgtgaacaaaatcaccaaagttctggatgaaattgacatcaagtactccatcttcactgatatcaaatccgacccaacgattgatagcgtgaaaaagggcgctaaagaaatgctgaactttgaaccggacaccatcatcagcatcggtggtggctctcctatggatgctgcgaaggtcatgcacctgctgtacgaatacccggaagcggaaatcgaaaacctggctatcaacttcatggacatccgcaaacgtatctgcaacttcccgaagctgggcactaaagctatttccgttgccatcccgactaccgcgggcactggttccgaagccacgccgttcgccgtgatcaccaacgatgaaaccggtatgaaatacccgctgacctcttacgaactgaccccgaacatggcaattatcgacaccgagctgatgctgaacatgccgcgcaagctgaccgctgctaccggcatcgacgctctggtacatgctattgaggcgtacgtttccgtgatggctaccgattacaccgacgaactggccctgcgtgcgatcaaaatgattttcaagtacctgcctcgcgcttacaaaaacggcacgaatgacatcgaggcgcgtgagaaaatggcccatgcaagcaacatcgcgggcatggccttcgccaacgcgttcctgggcgtgtgccactctatggctcacaaactgggtgctatgcaccacgtgccgcacggtatcgcgtgtgctgtcctgatcgaagaagtaattaagtacaacgctactgattgcccgactaaacagaccgccttcccacagtacaaatctcctaacgctaaacgtaagtacgctgagatcgccgaatacctgaacctgaagggtacgagcgacactgagaaagttactgcgctgatcgaagctatctctaaactgaaaattgacctgtccatcccgcagaacatcagcgccgcaggcatcaacaaaaaggacttttacaacacgctggacaaaatgagcgaactggcttttgacgaccagtgcaccactgcaaacccgcgttacccgctgatctctgagctgaaagacatttatatcaaatctttt

SEQ ID NO: 241 - DNA, 2573 bp, Artificial Sequence
  Synthetic Construct
atgaaagtgacgaaccaaaaagaactgaaacaaaaactgaatgaactgcgtgaggcccagaaaaagttcaacacgtatacccaggagcaagttgacaagatcttcaaacagtgtgccattgcggctgccaaagagcgtattaacttggccaaactggcggtggaagaaaccggcatcggtctggtcgaggacaagattatcaagaatcactttgccgcggagtatatctacaacaaagagaaaaacgaaaagacttgcggcatcattgatcatgatgacagcttgggtatcacgaaagtcgcagaaccaatcggtattgtcgcgagcattgtcccgaccactaatccgaccagcaccgcgatcttcaagagcttgatcagcctggcgacccgcaacgcgattttcttcagcccgcacccgcgtgcgaagaagagcaccatcgcagcggcgaagctgattttggatgccgcggttaaggccggtgcaccgaaaaacattattggctggattgacgagccgagcattgagctgtctcaggacctgatgagcgaagcggacattattctggccaccggtggtccgtctatggttaaggcagcgtactccagcggtaagcctgctatcggcgttggtgcgggcaatacgccggctatcatcgatgaaagcgcggatattgatatggcagttagctccatcattctgtccaaaacctacgacaatggtgttatctgtgcaagcgagcaaagcatcctggtgatgaatagcatttacgagaaggtcaaagaagagtttgttaagcgtggttcctatattctgaaccaggaggagattgcaaaaatcaaagaaacgatgtttaagaatggcgcgattaatgcagatattgttggtaagtccgcatacattatcgcgaagatggcgggtatcgaagtgccgcaaaccaccaaaatcttgatcggcgaagtgcagagcgtggagaagagcgaactgttcagccatgagaaactgagcccggttctggctatgtacaaagtgaaggactttgacgaagccctgaagaaagctcagcgtctgattgagctgggcggcagcggtcacacgagcagcctgtatatcgatagccaaaacaataaggacaaggtgaaagagttcggtctggcgatgaaaacctctcgcacgtttatcaacatgccgagcagccaaggtgcgagcggcgatctgtataacttcgcaatcgcgccttcttttacgctgggttgcggtacctggggcggtaattcggtgagccagaatgtcgagccgaagcacctgctgaacatcaaatcggtcgcggagcgccgtgagaagagacctggttcaaagtcccacagaaaatttacttcaaatacggctgcctgcgtttcgcgctgaaagaactgaaagacatgaacaaaaagcgtgcgttcattgttaccgacaaagacctgttcaaactgggttacgtgaacaaaatcaccaaagttctggatgaaattgacatcaagtactccatcttcactgatatcaaatccgacccaacgattgatagcgtgaaaaagggcgctaaagaaatgctgaactttgaaccggacaccatcatcagcatcggtggtggctctcctatggatgctgcgaaggtcatgcacctgctgtacgaatacccggaagcggaaatcgaaaacctggctatcaacttcatggacatccgcaaacgtatctgcaacttcccgaagctgggcactaaagctatttccgttgccatcccgactaccgcgggcactggttccgaagccacgccgttcgccgtgatcaccaacgatgaaaccggtatgaaatacccgctgacctcttacgaactgaccccgaacatggcaattatcgacaccgagctgatgctgaacatgccgcgcaagctgaccgctgctaccggcatcgacgctctggtacatgctattgaggcgtacgtttccgtgatggctaccgattacaccgacgaactggccctgcgtgcgatcaaaatgattttcaagtacctgcctcgcgcttacaaaaacggcacgaatgacatcgaggcgcgtgagaaaatggcccatgcaagcaacatcgcgggcatggccttcgccaacgcgttcctgggcgtgtgccactctatggctcacaaactgggtgctatgcaccacgtgccgcacggtatcgcgtgtgctgtcctgatcgaagaagtaattaagtacaacgctactgattgcccgactaaacagaccgccttcccacagtacaaatctcctaacgctaaacgtaagtacgctgagatcgccgaatacctgaacctgaagggtacgagcgacactgagaaagttactgcgctgatcgaagctatctctaaactgaaaattgacctgtccatcccgcagaacatcagcgccgcaggcatcaacaaaaaggacttttacaacacgctggacaaaatgagcgaactggcttttgacgaccagtgcaccactgcaaacccgcgttacccgctgatctctgagctgaaagacatttatatcaaatctttt

SEQ ID NO: 242 - DNA, 2573 bp, Artificial Sequence
  Synthetic Construct
atgaaagtgacgaaccaaaaagaactgaaacaaaaactgaatgaactgcgtgaggcccagaaaaagttcgctagctatacccaggagcaagttgacaagatcttcaaacagtgtgccattgcggctgccaaagagcgtattaacttggccgagctggcggtggaagaaaccggcatcggtctggtcgaggacaagattatcaagaatcactttgccgcggagtatatctacaacaaagagaaaaacgaaaagacttgcggcatcattgatcatgatgacagcttgggtatcacgaaagtcgcagaaccaatcggtattgtcgcggcaattgtcccgaccactaatccgaccagcaccgcgatcttcaagagcttgatcagcctgaaaacccgcaacgcgattttcttcagcccgcacccgcgtgcgaagaagagcaccatcgcagcggcgaagctgattttggatgccgcggttaaggccggtgcaccgaaaaacattattggctggattgacgagccgagcattgagctgtctcaggacctgatgagcgaagcggacattattctggccaccggtggtccgtctatggttaaggcagcgtactccagcggtaagcctgctatcggcgttggtgcgggcaatacgccggctatcatcgatgaaagcgcggatattgatatggcagttagctccatcattctgtccaaaacctacgacaatggtgttatctgtgcaagcgagcaaagcatcctggtgatgaatagcatttacgagaaggtcaaagaagagtttgttaagcgtggttcctatattctgaaccagaacgagattgcaaaaatcaaagaaacgatgtttaagaatggcgcgattaatgcagatattgttggtaagtccgcatacattatcgcgaagatggcgggtatcgaagtgccgcaattcaccaaaatcttgatcggcgaagtgcagagcgtggagaagagcgaactgttcagccatgagaaactgagcccggttctggctatgtacaaagtgaaggactttgacgaagccctgaagaaagctcagcgtctgattgagctgggcggcagcggtcacacgagcagcctgtatatcgatagccaaaacaataaggacaaggtgaaagagttcggtctggagatgaaaacctctcgcacgtttatcaacatgccgagcagccaaggtgcgagcggcgatctgtataacttcgcaatcgcgccttcttttacgctgggttgcggtacctggggcggtaattcggtgagccagaatgtcgagccgaagcacctgctgaacatcaaatcggtcgcggagcgccgtgagaagagacctggttcaaagtcccacagaaaatttacttcaaatacggctgcctgcgtttcgcgctgaaagaactgaaagacatgaacaaaaagcgtgcgttcattgttaccgacaaagacctgttcaaactgggttacgtgaacaaaatcaccaaagttctggatgaaattgacatcaagtactccatcttcactgatatcaaatccgacccaacgattgatagcgtgaaaaagggcgctaaagaaatgctgaactttgaaccggacaccatcatcagcatcggtggtggctctcctatggatgctgcgaaggtcatgcacctgctgtacgaatacccggaagcggaaatcgaaaacctggctatcaacttcatggacatccgcaaacgtatctgcaacttcccgaagctgggcactaaagctatttccgttgccatcccgactaccgcgggcactggttccgaagccacgccgttcgccgtgatcaccaacgatgaaaccggtatgaaatacccgctgacctcttacgaactgaccccgaacatggcaattatcgacaccgagctgatgctgaacatgccgcgcaagctgaccgctgctaccggcatcgacgctctggtacatgctattgaggcgtacgtttccgtgatggctaccgattacaccgacgaactggccctgcgtgcgatcaaaatgattttcaagtacctgcctcgcgcttacaaaaacggcacgaatgacatcgaggcgcgtgagaaaatggcccatgcaagcaacatcgcgggcatggccttcgccaacgcgttcctgggcgtgtgccactctatggctcacaaactgggtgctatgcaccacgtgccgcacggtatcgcgtgtgctgtcctgatcgaagaagtaattaagtacaacgctactgattgcccgactaaacagaccgccttcccacagtacaaatctcctaacgctaaacgtaagtacgctgagatcgccgaatacctgaacctgaagggtacgagcgacactgagaaagttactgcgctgatcgaagctatctctaaactgaaaattgacctgtccatcccgcagaacatcagcgccgcaggcatcaacaaaaaggacttttacaacacgctggacaaaatgagcgaactggcttttgacgaccagtgcaccactgcaaacccgcgttacccgctgatctctgagctgaaagacatttatatcaaatctttt

SEQ ID NO: 243 - DNA, 2573 bp, Artificial Sequence
  Synthetic Construct
atgaaagtgacgaaccaaaaagaactgaaacaaaaactgaatgaactgcgtgaggcccagaaaaagttcgctacgtatacccaggagcaagttgacaagatcttcaaacagtgtgccattgcggctgccaaactgcgtattaacttggcccgtctggcggtggaagaaaccggcatcggtctggtcgaggacaagattatcaagaatcactttgccgcggagtatatctacaacaaatacaaaaacgaaaagacttgcggcatcattgatcatgatgacagcttgggtatcacgaaagtcgcagaaccaatcggtattgtcgcggcaattgtcccgaccactaatccgaccagcaccgcgatcttcaagagcttgatcagcctgaaaacccgcaacgcgattttcttcagcccgcacccgcgtgcgaagaagagcaccatcgcagcggcgaagctgattttggatgccgcggttaaggccggtgcaccgaaaaacattattggctggattgacgagccgagcattgagctgtctcaggacatgatgagcgaagcggacattattctggccaccggtggtccgtctatggttaaggcagcgtactccagcggtaagcctgctatcggcgttggtgcgggcaatacgccggctatcatcgatgaaagcgcggatattgatatggcagttagctccatcattctgtccgcgacctacgacaatggtgttatctgtgcaagcgagcaaagcatcctggtgatgaatagcatttacgagaaggtcaaagaagagtttgttaagcgtggttcctatattctgaaccagaacgagattgcaaaaatcaaagaaacgatgtttaagaatggcgcgattaatgcagatattgttggtaagtccgcatacattatcgcgaagatggcgggtatcgaagtgccgcaaaccaccaaaatcttgatcggcgaagtgcagagcgtggagaagagcgaactgttcagccatgagaaactgagcccggttctggctatgtacaaagtgaaggactttgacgaagccctgaagaaagctcagcgtctgattgagctgggcggcagcggtcacacgagcagcctgtatatcgatagccaaaacaataaggacaaggtgaaagagttcggtctggcgatgaaaacctctcgcacgtttatcaacatgccgagcagccaaggtgcgagcggcgatctgtataacttcgcaatcgcgccttcttttacgctgggttgcggtacctggggcggtaattcggtgagccagaatgtcgagccgaagcacctgctgaacatcgtttcggtcgcggagcgccgtgagaagagacctggttcaaagtcccacagaaaatttacttcaaatacggctgcctgcgtttcgcgctgaaagaactgaaagacatgaacaaaaagcgtgcgttcattgttaccgacaaagacctgttcaaactgggttacgtgaacaaaatcaccaaagttctggatgaaattgacatcaagtactccatcttcactgatatcaaatccgacccaacgattgatagcgtgaaaaagggcgctaaagaaatgctgaactttgaaccggacaccatcatcagcatcggtggtggctctcctatggatgctgcgaaggtcatgcacctgctgtacgaatacccggaagcggaaatcgaaaacctggctatcaacttcatggacatccgcaaacgtatctgcaacttcccgaagctgggcactaaagctatttccgttgccatcccgactaccgcgggcactggttccgaagccacgccgttcgccgtgatcaccaacgatgaaaccggtatgaaatacccgctgacctcttacgaactgaccccgaacatggcaattatcgacaccgagctgatgctgaacatgccgcgcaagctgaccgctgctaccggcatcgacgctctggtacatgctattgaggcgtacgtttccgtgatggctaccgattacaccgacgaactggccctgcgtgcgatcaaaatgattttcaagtacctgcctcgcgcttacaaaaacggcacgaatgacatcgaggcgcgtgagaaaatggcccatgcaagcaacatcgcgggcatggccttcgccaacgcgttcctgggcgtgtgccactctatggctcacaaactgggtgctatgcaccacgtgccgcacggtatcgcgtgtgctgtcctgatcgaagaagtaattaagtacaacgctactgattgcccgactaaacagaccgccttcccacagtacaaatctcctaacgctaaacgtaagtacgctgagatcgccgaatacctgaacctgaagggtacgagcgacactgagaaagttactgcgctgatcgaagctatctctaaactgaaaattgacctgtccatcccgcagaacatcagcgccgcaggcatcaacaaaaaggacttttacaacacgctggacaaaatgagcgaactggcttttgacgaccagtgcaccactgcaaacccgcgttacccgctgatctctgagctgaaagacatttatatcaaatctttt

SEQ ID NO: 244 - DNA, 2573 bp, Artificial Sequence
  Synthetic Construct
atgaaagtgacgaaccaaaaagaactgaaacaaaaactgaatgaactgcgtgaggcccagaaaaagttcgctacgtgcacccaggagcaagttgacaagttcttcaaacagtgtgccattgcggctgccaaagagcgtattaacttggccaaactggcggtggaagaaaccggcatcggtctggtcgaggacaagattatcaagaatcactttgccgcggagtatatctacaacaaatacaaaaacgaaaagacttgcggcatcattgatcatgatgacagcttgggtatcacgaaagtcgcagaaccaatcggtattgtcgcggcaattgtcccgaccactaatccgaccagcaccgcgatcttcaagagcttgatcagcctggcgacccgcaacgcgattttcttcagcccgcacccgcgtgcgaagaagagcaccatcgcagcggcgaagctgattttggatgccgcggttaaggccggtgcaccgaaaaacattattggctggattgacgagccgagcattgagctgtctcaggacctgatgagcgaagcggacattattctggccaccggtggtccgtctatggttaaggcagcgtactccagcggtaagcctgctatcggcgttggtgcgggcaatacgccggctatcatcgatgaaagcgcggatattgatatggcagttagctccatcattctgtccaaaacctacgacaatggtgttatctgtgcaagcgagcaaagcatcctggtgatgaatagcatttacgagaaggtcaaagaagagtttgttaagcgtggttcctatattctgaaccagaacgagattgcaaaaatcaaagaaacgatgtttaagaatggcgcgattaatgcagatattgttggtaagtccgcatacattatcgcgaagatggcgggtatcgaagtgccgcaaaccaccaaaatcttgatcggcgaagtgcaggacgtggagaagagcgaactgttcagccatgagaaactgagcccggttctggctatgtacaaagtgaaggactttgacgaagccctgaagctggctcagcgtctgattgagctgggcggcagcggtcacacgagcagcctgtatatcgatagccaaaacaataaggacaaggtgaaagagttcggtctggcgatgaaaacctctcgcacgtttatcaacatgccgagcagccaaggtgcgagcggcgatctgtataacttcgcaatcgcgccttcttttacgctgggttgcggtacctggggcggtaattcggtgagccagaatgtcgagccgaagcacctgctgaacatcaaatcggtcgcggagcgccgtgagaagagacctggttcaaagtcccacagaaaatttacttcaaatacggctgcctgcgtttcgcgctgaaagaactgaaagacatgaacaaaaagcgtgcgttcattgttaccgacaaagacctgttcaaactgggttacgtgaacaaaatcaccaaagttctggatgaaattgacatcaagtactccatcttcactgatatcaaatccgacccaacgattgatagcgtgaaaaagggcgctaaagaaatgctgaactttgaaccggacaccatcatcagcatcggtggtggctctcctatggatgctgcgaaggtcatgcacctgctgtacgaatacccggaagcggaaatcgaaaacctggctatcaacttcatggacatccgcaaacgtatctgcaacttcccgaagctgggcactaaagctatttccgttgccatcccgactaccgcgggcactggttccgaagccacgccgttcgccgtgatcaccaacgatgaaaccggtatgaaatacccgctgacctcttacgaactgaccccgaacatggcaattatcgacaccgagctgatgctgaacatgccgcgcaagctgaccgctgctaccggcatcgacgctctggtacatgctattgaggcgtacgtttccgtgatggctaccgattacaccgacgaactggccctgcgtgcgatcaaaatgattttcaagtacctgcctcgcgcttacaaaaacggcacgaatgacatcgaggcgcgtgagaaaatggcccatgcaagcaacatcgcgggcatggccttcgccaacgcgttcctgggcgtgtgccactctatggctcacaaactgggtgctatgcaccacgtgccgcacggtatcgcgtgtgctgtcctgatcgaagaagtaattaagtacaacgctactgattgcccgactaaacagaccgccttcccacagtacaaatctcctaacgctaaacgtaagtacgctgagatcgccgaatacctgaacctgaagggtacgagcgacactgagaaagttactgcgctgatcgaagctatctctaaactgaaaattgacctgtccatcccgcagaacatcagcgccgcaggcatcaacaaaaaggacttttacaacacgctggacaaaatgagcgaactggcttttgacgaccagtgcaccactgcaaacccgcgttacccgctgatctctgagctgaaagacatttatatcaaatctttt

SEQ ID NO: 245 - DNA, 2573 bp, Artificial Sequence
  Synthetic Construct
atgaaagtgacgaaccaaaaagaactgaaacaaaaactgaatgaactgcgtgaggcccagaaaaagttcctgacgtatacccaggagcaagttgacaagatcttcaaacagtgtgccattgcggctgccaaagagcgtattaacttggccaaactggcggtggaagaaaccggcatcggtctggtcgaggacaagattatcaagaatcactttgccgcggagtatatctacaacaaatacaaaaacgaaaagacttgcggcatcattgatcatgatgacagcttgggtatcacgaaagtcgcagaaccaatcggtattgtcgcggcaattgtcccgaccactaatccgaccagcaccgcgatcttcaagagcttgatcagcctgaaaacccgcaacgcgattttcttcagcccgcacccgcgtgcgaagaagagcaccatcgcagcggcgaagctgattttggatgccgcggttaaggccggtgcaccgaaaaacattattggctggattgacgagccgagcattgagctgtctcaggacctgatgaaagaaccggacattattctggccaccggtggtccgtctatggttaaggcagcgtactccagcggtaagcctgctatcggcgttggtgcgggcaatacgccggctatcatcgatgaaagcgcggatattgatatggcagttagctccatcattctgtccaaaacctacgacaatggtgttatctgtgcaagcgagcaaagcatcctggtgatgaatagcatttacgagaaggtcaaagaagagtttgttaagcgtggttcctatattctgaaccagaacgagattgcaaaaatcaaagaaacgatgtttaagaatggcgcgattaatgcagatattgttggtaagtccgcatacattatcgcgaagatggcgggtatcgaagtgccgcaaaccaccaaaatcttgatcggcgaagtgcaggacgtggaggcgagcgaactgttcagccatgagaaactgagcccggttctggctatgtacaaagtgaaggactttgacgaagccctgaagaaagctcagcgtctgattgagctgggcggcagcggtcacacgagcagcctgtatatcgatagccaaaacaataaggacaaggtgaaagagttcggtctggcgatgaaaacctctcgcacgtttatcaacatgccgagcagccaaggtgcgagcggcgatctgtataacttcgcaatcgcgccttcttttacgctgggttgcggtacctggggcggtaattcggtgagccagaatgtcgagccgaagcacctgctgaacatcaaatcggtcgcggagcgccgtgagaagagacctggttcaaagtcccacagaaaatttacttcaaatacggctgcctgcgtttcgcgctgaaagaactgaaagacatgaacaaaaagcgtgcgttcattgttaccgacaaagacctgttcaaactgggttacgtgaacaaaatcaccaaagttctggatgaaattgacatcaagtactccatcttcactgatatcaaatccgacccaacgattgatagcgtgaaaaagggcgctaaagaaatgctgaactttgaaccggacaccatcatcagcatcggtggtggctctcctatggatgctgcgaaggtcatgcacctgctgtacgaatacccggaagcggaaatcgaaaacctggctatcaacttcatggacatccgcaaacgtatctgcaacttcccgaagctgggcactaaagctatttccgttgccatcccgactaccgcgggcactggttccgaagccacgccgttcgccgtgatcaccaacgatgaaaccggtatgaaatacccgctgacctcttacgaactgaccccgaacatggcaattatcgacaccgagctgatgctgaacatgccgcgcaagctgaccgctgctaccggcatcgacgctctggtacatgctattgaggcgtacgtttccgtgatggctaccgattacaccgacgaactggccctgcgtgcgatcaaaatgattttcaagtacctgcctcgcgcttacaaaaacggcacgaatgacatcgaggcgcgtgagaaaatggcccatgcaagcaacatcgcgggcatggccttcgccaacgcgttcctgggcgtgtgccactctatggctcacaaactgggtgctatgcaccacgtgccgcacggtatcgcgtgtgctgtcctgatcgaagaagtaattaagtacaacgctactgattgcccgactaaacagaccgccttcccacagtacaaatctcctaacgctaaacgtaagtacgctgagatcgccgaatacctgaacctgaagggtacgagcgacactgagaaagttactgcgctgatcgaagctatctctaaactgaaaattgacctgtccatcccgcagaacatcagcgccgcaggcatcaacaaaaaggacttttacaacacgctggacaaaatgagcgaactggcttttgacgaccagtgcaccactgcaaacccgcgttacccgctgatctctgagctgaaagacatttatatcaaatctttt

SEQ ID NO: 246 - DNA, 2573 bp, Artificial Sequence
  Synthetic Construct
atgaaagtgacgaaccaaaaagaactgaaacaaaaactgaatgaactgcgtgaggcccagaaaaagttcctgtgctatacccaggagcaagttgacaagatcttcaaacagtgtgccattgcggctgccaaagagcgtattaacttggccaaactggcggtggaagaaaccggcatcggtctggtcgaggacaagattatcaagaatcactttgccgcggagtatatctacaacaaatacaaaaaccacaagacttgcggcatcattgatcatgatgacagcttgggtatcacgaaagtcgcagaaccaatcggtattgtcgcggcaattgtcccgaccactaatccgaccagcaccgcgatcttcaagagcttgatcagcctgaaaacccgcaacgcgattttcttcagcccgcacccgcgtgcgaagaagagcaccatcgcagcggcgaagctgattttggatgccgcggttaaggccggtgcaccgaaaaacattattggctggattgacgagccgagcattgagctgtctcaggacctgatgagcgaagcggacattattctggccaccggtggtccgtctatggttaaggcagcgtactccagcggtaagcctgctatcggcgttggtgcgggcaatacgccggctatcatcgatgaaagcgcggatattgatatggcagttagctccatcattctgtccaaaacctacgacaatggtgttatctgtgcaagcgagcaaagcatcctggtgatgaatagcatttacgagaaggtcaaagcggagtttgttaagcgtggttcctatattctgaaccagaacgagattgcaaaaatcaaagaaacgatgtttaagaatggcgcgattaatcgtgatattgttggtaagtccgcatacattatcgcgaagatggcgggtatcgaagtgccgcaaaccaccaaaatcttgatcggcgaagtgcagagcgtggagaagagcgaactgttcagccatgagaaactgagcccggttctggctatgtacaaagtgaaggactttgacgaagccctgaagaaagctcagcgtctgattgagctgggcggcagcggtcacacgagcagcctgtatatcgatagccaaaacaataaggacaaggtgaaagagttcggtctggcgatgaaaacctctcgcacgtttatcaacatgccgagcagccaaggtgcgagcggcgatctgtataacttcgcaatcgcgccttcttttacgctgggttgcggtacctggggcggtaattcggtgagccagaatgtcgagccgaagcacctgctgaacatcaaatcggtcgcggagcgccgtgagaagagacctggttcaaagtcccacagaaaatttacttcaaatacggctgcctgcgtttcgcgctgaaagaactgaaagacatgaacaaaaagcgtgcgttcattgttaccgacaaagacctgttcaaactgggttacgtgaacaaaatcaccaaagttctggatgaaattgacatcaagtactccatcttcactgatatcaaatccgacccaacgattgatagcgtgaaaaagggcgctaaagaaatgctgaactttgaaccggacaccatcatcagcatcggtggtggctctcctatggatgctgcgaaggtcatgcacctgctgtacgaatacccggaagcggaaatcgaaaacctggctatcaacttcatggacatccgcaaacgtatctgcaacttcccgaagctgggcactaaagctatttccgttgccatcccgactaccgcgggcactggttccgaagccacgccgttcgccgtgatcaccaacgatgaaaccggtatgaaatacccgctgacctcttacgaactgaccccgaacatggcaattatcgacaccgagctgatgctgaacatgccgcgcaagctgaccgctgctaccggcatcgacgctctggtacatgctattgaggcgtacgtttccgtgatggctaccgattacaccgacgaactggccctgcgtgcgatcaaaatgattttcaagtacctgcctcgcgcttacaaaaacggcacgaatgacatcgaggcgcgtgagaaaatggcccatgcaagcaacatcgcgggcatggccttcgccaacgcgttcctgggcgtgtgccactctatggctcacaaactgggtgctatgcaccacgtgccgcacggtatcgcgtgtgctgtcctgatcgaagaagtaattaagtacaacgctactgattgcccgactaaacagaccgccttcccacagtacaaatctcctaacgctaaacgtaagtacgctgagatcgccgaatacctgaacctgaagggtacgagcgacactgagaaagttactgcgctgatcgaagctatctctaaactgaaaattgacctgtccatcccgcagaacatcagcgccgcaggcatcaacaaaaaggacttttacaacacgctggacaaaatgagcgaactggcttttgacgaccagtgcaccactgcaaacccgcgttacccgctgatctctgagctgaaagacatttatatcaaatctttt

SEQ ID NO: 247 - DNA, 2573 bp, Artificial Sequence
  Synthetic Construct
atgaaagtgacgaaccaaaaagaactgaaacaaaaactgaatgaactgcgtgaggcccagaaaaagttcgctacgtatacccaggagcaagttgacaagatcttcaaacagtgtgccattgcggctgccaaataccgtattaacttggccaaactggcggtggaagaaaccggcatcggtctggtcgaggacaagattatcaagaatcactttgccgcggagtatatctacaacaaatacaaaaacgaaaagacttgcggcatcattgatcatgatgacagcttgggtatcacgaaagtcgcagaaccaatcggtattgtcgcggcaattgtcccgaccactaatccgaccagcaccgcgatcttcaagagcttgatcagcctgaaaacccgcaacgcgattttcttcagcccgcacccgcgtgcgaagaagagcaccatcgcagcggcgaagctgattttggatgccgcggttaaggccggtgcaccgaaaaacattattggctggattgacgagccgagcattgagctgtctcaggacctgatgagcgaaccggacattattctggccaccggtggtccgtctatggttaaggcagcgtactccagcggtaagcctgctatcggcgttggtgcgggcaatacgccggctatcatcgatgaaagcgcggatattgatatggcagttagctccatcattctgtccaaaacctacgacaatggtgttatctgtgcaagcgagcaaagcatcctggtgatgaatagcatttacgagaaggtcaaagaagagtttgttaagcgtggttcctatattctgaaccagaacgagattgcaaaaatcaaagaaacgatgtttaagaatggcgcgattaatgcagatattgttggtaagtccgcatacattatcgcgaagatggcgggtatcgaagtgccgcaaaccaccaaaatcttgatcggcgaagtgcagagcgtggagaagagcgaactgttcagcgttgagctgctgagcccggttctggctatgtacaaagtgaaggactttgacgaagccctgaagaaagctgagcgtctgattgagctgggcggcagcggtcacacgagcagcctgtatatcgatagccaaaacaataaggacaaggtgaaagagttcggtctggcgatgaaaacctctcgcacgtttatcaacatgccgagcagccaaggtgcgagcggcgatctgtataacttcgcaatcgcgccttcttttacgctgggttgcggtacctggggcggtaattcggtgagccagaatgtcgagccgaagcacctgctgaacatcaaatcggtcgcggagcgccgtgagaagagacctggttcaaagtcccacagaaaatttacttcaaatacggctgcctgcgtttcgcgctgaaagaactgaaagacatgaacaaaaagcgtgcgttcattgttaccgacaaagacctgttcaaactgggttacgtgaacaaaatcaccaaagttctggatgaaattgacatcaagtactccatcttcactgatatcaaatccgacccaacgattgatagcgtgaaaaagggcgctaaagaaatgctgaactttgaaccggacaccatcatcagcatcggtggtggctctcctatggatgctgcgaaggtcatgcacctgctgtacgaatacccggaagcggaaatcgaaaacctggctatcaacttcatggacatccgcaaacgtatctgcaacttcccgaagctgggcactaaagctatttccgttgccatcccgactaccgcgggcactggttccgaagccacgccgttcgccgtgatcaccaacgatgaaaccggtatgaaatacccgctgacctcttacgaactgaccccgaacatggcaattatcgacaccgagctgatgctgaacatgccgcgcaagctgaccgctgctaccggcatcgacgctctggtacatgctattgaggcgtacgtttccgtgatggctaccgattacaccgacgaactggccctgcgtgcgatcaaaatgattttcaagtacctgcctcgcgcttacaaaaacggcacgaatgacatcgaggcgcgtgagaaaatggcccatgcaagcaacatcgcgggcatggccttcgccaacgcgttcctgggcgtgtgccactctatggctcacaaactgggtgctatgcaccacgtgccgcacggtatcgcgtgtgctgtcctgatcgaagaagtaattaagtacaacgctactgattgcccgactaaacagaccgccttcccacagtacaaatctcctaacgctaaacgtaagtacgctgagatcgccgaatacctgaacctgaagggtacgagcgacactgagaaagttactgcgctgatcgaagctatctctaaactgaaaattgacctgtccatcccgcagaacatcagcgccgcaggcatcaacaaaaaggacttttacaacacgctggacaaaatgagcgaactggcttttgacgaccagtgcaccactgcaaacccgcgttacccgctgatctctgagctgaaagacatttatatcaaatctttt

SEQ ID NO: 248 - DNA, 2573 bp, Artificial Sequence
  Synthetic Construct
atgaaagtgacgaaccaaaaagaactgaaacaaaaactgaatgaactgcgtgaggcccagaaaaagttcgctacgtatacccaggagcaagttgacaagatcttcaaacagtgtgccattgcggctgccaaataccgtattaacttggccaaactggcggtggaagaaaccggcatcggtctggtcgaggacaagattatcaagaatcactttgccgcggagtatatctacaacaaatacaaaaacgaaaagacttgcggcatcattgatcatgatgacagcttgggtatcacgaaagtcgcagaaccaatcggtattgtcgcggcaattgtcccgaccactaatccgaccagcaccgcgatcttcaagagcttgatcagcctgaaaacccgcaacgcgattttcttcagcccgcacccgcgtgcgaagaagagcaccatcgcagcggcgaagctgattttggatgccgcggttaaggccggtgcaccgaaaaacattattggctggattgacgagccgagcattgagctgtctcaggacctgatgagcgaagcggacattattctggccaccggtggtccgtctatggttaaggcagcgtactccagcggtaagcctgctatcggcgttggtgcgggcaatacgccggctatcatcgatgaaagcgcggatattgatatggcagttagctccatcattctgtccaaaacctacgacaatggtgttatctgtgcaagcgagcaaagcatcctggtgatgaatagcatttacgagaaggtcaaagaagagtttgttaagcgtggttcctatattctgaaccaggaggagattgcaaaaatcaaagaaacgatgtttaagaatggcgcgattaatcgtgatattgttggtaagtccgcatacattatcgcgaagatggcgggtatcgaagtgccgcaaaccaccaaaatcttgatcggcgaagtgcagagcgtggagaagagcgaactgttcagccatgagaaactgagcccggttctggctatgtacaaagtgaaggactttgacgaagccctggacaaagctcagcgtctgattgagctgggcggcagcggtcacacgagcagcctgtatatcgatagccaaaacaataaggacaaggtgaaagagttcggtctggcgatgaaaacctctcgcttctttatcaacatgccgagcagccaaggtgcgagcggcgatctgtataacttcgcaatcgcgccttcttttacgctgggttgcggtacctggggcggtaattcggtgagccagaatgtcgagccgaagcacctgctgaacatcaaatcggtcgcggagcgccgtgagaagagacctggttcaaagtcccacagaaaatttacttcaaatacggctgcctgcgtttcgcgctgaaagaactgaaagacatgaacaaaaagcgtgcgttcattgttaccgacaaagacctgttcaaactgggttacgtgaacaaaatcaccaaagttctggatgaaattgacatcaagtactccatcttcactgatatcaaatccgacccaacgattgatagcgtgaaaaagggcgctaaagaaatgctgaactttgaaccggacaccatcatcagcatcggtggtggctctcctatggatgctgcgaaggtcatgcacctgctgtacgaatacccggaagcggaaatcgaaaacctggctatcaacttcatggacatccgcaaacgtatctgcaacttcccgaagctgggcactaaagctatttccgttgccatcccgactaccgcgggcactggttccgaagccacgccgttcgccgtgatcaccaacgatgaaaccggtatgaaatacccgctgacctcttacgaactgaccccgaacatggcaattatcgacaccgagctgatgctgaacatgccgcgcaagctgaccgctgctaccggcatcgacgctctggtacatgctattgaggcgtacgtttccgtgatggctaccgattacaccgacgaactggccctgcgtgcgatcaaaatgattttcaagtacctgcctcgcgcttacaaaaacggcacgaatgacatcgaggcgcgtgagaaaatggcccatgcaagcaacatcgcgggcatggccttcgccaacgcgttcctgggcgtgtgccactctatggctcacaaactgggtgctatgcaccacgtgccgcacggtatcgcgtgtgctgtcctgatcgaagaagtaattaagtacaacgctactgattgcccgactaaacagaccgccttcccacagtacaaatctcctaacgctaaacgtaagtacgctgagatcgccgaatacctgaacctgaagggtacgagcgacactgagaaagttactgcgctgatcgaagctatctctaaactgaaaattgacctgtccatcccgcagaacatcagcgccgcaggcatcaacaaaaaggacttttacaacacgctggacaaaatgagcgaactggcttttgacgaccagtgcaccactgcaaacccgcgttacccgctgatctctgagctgaaagacatttatatcaaatctttt

SEQ ID NO: 249 - DNA, 2573 bp, Artificial Sequence
  Synthetic Construct
atgaaagtgacgaaccaaaaagaactgaaacaaaaactgaatgaactgcgtgaggcccagaaaaagttcgctacgtatacccaggagcaagttgacaagatcttcaaacagtgtgccattgcggctgccaaagagcgtattaacttggccgagctggcggtggaagaaaccggcatcggtctggtcgaggacaagattatcaagaatcactttgccgcggagtatatctacaacaaatacaaaaacggtaagacttgcggcatcattgatcatgatgacagcttgggtatcacgaaagtcgcagaaccaatcggtattgtcgcggcaattgtcccgaccactaatccgaccagcaccgcgatcttcaagagcttgatcagcctgaaaacccgcaacgcgattttcttcagcccgcacccgcgtgcgaagaagagcaccatcgcagcggcgaagctgattttggatgccgcggttaaggccggtgcaccgaaaaacattattggctggattgacgagccgagcattgagctgtctcaggacctgatgagcgaagcggacattattctggccaccggtggtccgtctatggttaaggcagcgtactccagcggtaagaaagctatcggcgcgggtgcgggcaatacgccggctatcatcgatgaaagcgcggatattgatatggcagttagctccatcattctgtccgcgacctacgacaatggtgttatctgtgcaagcgagcaaagcatcctggtgatgaatagcatttacgagaaggtcaaagaagagtttgttaagcgtggttcctatattctgaaccagaacgagattgcaaaaatcaaagaaacgatgtttaagaatggcgcgattaatgcagatattgttggtaagtccgcatacattatcgcgaagatggcgggtatcgaagtgccgcaaaccaccaaaatcttgatcggcgaagtgcagagcgtggagaagagcgaactgttcagccatgagaaactgagcccggttctggctatgtacaaagtgaaggactttgacgaagccctgaagaaagctcagcgtctgattgagctgggcggcagcggtcacacgagcagcctgtatatcgatagccaaaacaataaggacaaggtgaaagagttcggtctggcgatgaaaacctctcgcacgtttatcaacatgccgagcagccaaggtgcgagcggcgatctgtataacttcgcaatcgcgccttcttttacgctgggttgcggtacctggggcggtaattcggtgagccagaatgtcgagccgaagcacctgctgaacatcaaatcggtcgcggagcgccgtgagaagagacctggttcaaagtcccacagaaaatttacttcaaatacggctgcctgcgtttcgcgctgaaagaactgaaagacatgaacaaaaagcgtgcgttcattgttaccgacaaagacctgttcaaactgggttacgtgaacaaaatcaccaaagttctggatgaaattgacatcaagtactccatcttcactgatatcaaatccgacccaacgattgatagcgtgaaaaagggcgctaaagaaatgctgaactttgaaccggacaccatcatcagcatcggtggtggctctcctatggatgctgcgaaggtcatgcacctgctgtacgaatacccggaagcggaaatcgaaaacctggctatcaacttcatggacatccgcaaacgtatctgcaacttcccgaagctgggcactaaagctatttccgttgccatcccgactaccgcgggcactggttccgaagccacgccgttcgccgtgatcaccaacgatgaaaccggtatgaaatacccgctgacctcttacgaactgaccccgaacatggcaattatcgacaccgagctgatgctgaacatgccgcgcaagctgaccgctgctaccggcatcgacgctctggtacatgctattgaggcgtacgtttccgtgatggctaccgattacaccgacgaactggccctgcgtgcgatcaaaatgattttcaagtacctgcctcgcgcttacaaaaacggcacgaatgacatcgaggcgcgtgagaaaatggcccatgcaagcaacatcgcgggcatggccttcgccaacgcgttcctgggcgtgtgccactctatggctcacaaactgggtgctatgcaccacgtgccgcacggtatcgcgtgtgctgtcctgatcgaagaagtaattaagtacaacgctactgattgcccgactaaacagaccgccttcccacagtacaaatctcctaacgctaaacgtaagtacgctgagatcgccgaatacctgaacctgaagggtacgagcgacactgagaaagttactgcgctgatcgaagctatctctaaactgaaaattgacctgtccatcccgcagaacatcagcgccgcaggcatcaacaaaaaggacttttacaacacgctggacaaaatgagcgaactggcttttgacgaccagtgcaccactgcaaacccgcgttacccgctgatctctgagctgaaagacatttatatcaaatctttt

SEQ ID NO: 250 - protein, 368 aa, Pichia kudriavzevii
MFMKGLTYLKPGIVSWQSIPKPVLKKPTDVIGKVVTTTICGSDLHILKGDVPETTALAATTGHGVVLGHEAIIEIESVGDAVKNFSKGDVCIVSCITSCGKCYYCKRNLQSHCTGHMEGTSGWVFGHEIDGTQAEYVRVPCADYGLYKVPEGVAYEKLLMLSDAIPTSYEIGILNGEVKEGDSVAVVGLGPVGLSALLTAINKKPKQLIAIDMDENRLDLAKQLGATHIINSTNMPNEEVAKKVQEISKDLEPGRESGVDVAIECVGVPPTFELCEDLIASGGTIANVGVHGAKVDLKLQELWIKNCKITTGLVSTYSIPDLLNQVADGSLDPSPIITHHFKFDEFEKAYQVFKDAKNTKAMKIILTP

SEQ ID NO: 251 - protein, 251 aa, Pyrococcus furiosus
MSKNYKKHQAYIAGRDKMKVAVITGASRGIGEAIAKALAEDGYSLALGARSVDRLEKIAKELSEKHGVEVFYDYLDVSKPESVEEFARKTLAHFGDVDVVVANAGLGYFGRLEELTEEQFHEMIEVNLLGVWRTIKAFLNSLKRTGGVAIVVTSDVSARLLPYGGGYVATKWAARALVRTFQIENPDVRFFELRPGAVDTYFGGSKAGKPKEQGYLKPEEVAEAVKYLLRLPKDVRVEELMLRSIYQKPEY

SEQ ID NO: 252 - protein, 349 aa, Cupriavidus necator
MKISLTSARQLARDILAAQQVPADIADDVAEHLVESDRCGYISHGLSILPNYRTALDGHSVNPQGRAKCVLDQGTLMVFDGDGGFGQHVGKSVMQAAIERVRQHGHCIVTLRRSHHLGRMGHYGEMAAAAGFVLLSFTNVINRAPVVAPFGGRVARLTTNPLCFAGPMPNGRPPLVVDIATSAIAINKARVLAEKGEPAPEGSIIGADGNPTTDASTMFGEHPGALLPFGGHKGYALGVVAELLAGVLSGGGTIQPDNPRGGVATNNLFAVLLNPALDLGLDWQSAEVEAFVRYLHDTPPAPGVDRVQYPGEYEAANRAQASDTLNINPAIWRNLERLAQSLNVAVPTA

SEQ ID NO: 253 - protein, 352 aa, Thermoanaerobacter brockii
MKGFAMLSIGKVGWIEKEKPAPGPFDAIVRPLAVAPCTSDIHTVFEGAIGERHNMILGHEAVGEVVEVGSEVKDFKPGDRVVVPAITPDWRTSEVQRGYHQHSGGMLAGWKFSNVKDGVFGEFFHVNDADMNLAHLPKEIPLEAAVMIPDMMTTGFHGAELADIELGATVAVLGIGPVGLMAVAGAKLRGAGRIIAVGSRPVCVDAAKYYGATDIVNYKDGPIESQIMNLTEGKGVDAAIIAGGNADIMATAVKIVKPGGTIANVNYFGEGEVLPVPRLEWGCGMAHKTIKGGLCPGGRLRMERLIDLVFYKRVDPSKLVTHVFRGFDNIEKAFMLMKDKPKDLIKPVVILA

SEQ ID NO: 254 - protein, 351 aa, Clostridium beijerinckii
MKGFAMLGINKLGWIEKERPVAGSYDAIVRPLAVSPCTSDIHTVFEGALGDRKNMILGHEAVGEVVEVGSEVKDFKPGDRVIVPCTTPDWRSLEVQAGFQQHSNGMLAGWKFSNFKDGVFGEYFHVNDADMNLAILPKDMPLENAVMITDMMTTGFHGAELADIQMGSSVVVIGIGAVGLMGIAGAKLRGAGRIIGVGSRPICVEAAKFYGATDILNYKNGHIVDQVMKLTNGKGVDRVIMAGGGSETLSQAVSMVKPGGIISNINYHGSGDALLIPRVEWGCGMAHKTIKGGLCPGGRLRAEMLRDMVVYNRVDLSKLVTHVYHGFDHIEEALLLMKDKPKDLIKAVVIL

SEQ ID NO: 255 - protein, 385 aa, Kluyveromyces lactis
MRALAYFGKQDIRYTKDLEEPVIETDDGIEIEVSWCGICGSDLHEYLDGPIFFPEDGKVHDVSGLGLPQAMGHEMSGIVSKVGPKVTNIKAGDHVVVEATGTCLDHYTWPNAAHAKDAECAACQRGFYNCCAHLGFMGLGVHSGGFAEKVVVSEKHVVKIPNTLPLDVAALVEPISVSWHAVRISKLQKGQSALVLGAGPIGLATILALQGHGASKIVVSEPAEIRRNQAAKLGVETFDPSEHKEDAVNILKKLAPGGEGFDFAYDCSGVKPTFDTGVHATTFRGMYVNIAIWGHKPIDFKPMDVTLQEKFVTGSMCYTIKDFEDVVQALGNGSIAIDKARHLITGRQKIEDGFTKGFDELMNHKEKNIKILLTPNNHGELDATN

SEQ ID NO: 256 - protein, 361 aa, Unknown
  Phytomonas sp. ADU-2003
MLRRSTLRCVPKTMKAAVFKGKNRIVLDEKPVPVPKHSEALIKITTTTICGTDIHILKGEYPVAEGLTIGHEPIGVIESFGDGVTGFKKGQRVVIGAITPCSSCSSCMEGIRSQCGSKLMGGWKFGNTIDGSQAEYLIVPDAAANMYPIPDGITDEQVLMCPDIMSTGFSGPESAGVKVGDTVVIYAQGPIGLGATAGAKMMGATKVIVVDRFPERLALAKKLGADYTLDFTKCNPIEEVMRLTGGRGVDVAIEALGLQSTFESCLRCLKPGGVLSSLGVYSDDLRLPNDAFAAGLGDFKIVTTLCPGGKERMRRLLSVIESGRVDMRPMVTHTFKLDEIEKAYDLFGNQRDGVLKVAIKP

SEQ ID NO: 257 - protein, 366 aa, Ralstonia eutropha
MTAMMKAAVFVEPGRIELADKPIPDIGPNDALVRITTTTICGTDVHILKGEYPVAKGLTVGHEPVGIIEKLGSAVTGYREGQRVIAGAICPNFNSYAAQDGVASQDGSYLMASGQCGCHGYKATAGWRFGNMIDGTQAEYVLVPDAQANLTPIPDGLTDEQVLMCPDIMSTGFKGAENANIRIGDTVAVFAQGPIGLCATAGARLCGATTIIAIDGNDHRLEIARKMGADVVLNFRNCDVVDEVMKLTGGRGVDASIEALGTQATFEQSLRVLKPGGTLSSLGVYSSDLTIPLSAFAAGLGDHKINTALCPGGKERMRRLINVIESGRVDLGALVTHQYRLDDIVAAYDLFANQRDGVLKIAIKPH

SEQ ID NO: 258 - protein, 365 aa, Trichomonas vaginalis
MTFELPKTMKAFAMRKIGEVGWIEKPVPECGPNDAICRPLALAPCTSDIHTVWAGAIGERHDMILGHEAVGQVVKIGSEVKNLKVGDKVLVPAVTPDWGSEAAQEGFPAHSGGMLGGWKFSNFKDGVFAEYFHVNEADANLAKLPEGLTPRDVIMCSDMMTTGFHGAELAEVKLGDIVVVIGIGPVGLMSVRGAALMGASRIFAVGSRPHCCDTAVQYGATDIINYKNGDIVEQILKATGGKGVDRVIIAGGDVHTFAQAIKMIRAGGVIGNVNYLGEGEMIDVPRVEWGVGMGHKFIHGGLTPGGALRMEKMANLIKYKKVDPTKLITHEFKGLEKVEDALMLMKDKPVDLIKPVVLIEYNDKL

SEQ ID NO: 259 - protein, 358 aa, Pseudomonas fluorescens
MMATMKAAIFVEKNRIVLEDKPIPEVGPLDALIRITTTTICGTDVHILRGEYPVAKGLTIGHEPVGIIERLGSQVRGFVEGQRVIAGAITPSGQSYACLCGCASQDGPDTRHGFRATGGWKFGNIIDGCQAEYVLVPDALANLCPIPDGLSDEQVLMCPDIMSTGFSGAERGEINIGDTVAVFALGPIGLCAVAGARLKGATTIIGVDAVAQRMSVARQLGATHVVNFKEANVVEQIMALTDGRGVDVSIEALGTQGTFESALRVLRPGGRLSSLGVYSSDLRIPLDAFAAGLGDYSIVTTLCPGGKERMRRLMAVVQSGAVDLSPLVTHHFKLDDIEAAYELFANQRDGVMKVAITP

SEQ ID NO: 260 - protein, 253 aa, Lactococcus lactis
MSKVAAVTGAGQGIGFAIAKRLYNDGFKVAIIDYNEETAQQAAKELGGESFALKADVSDRDQVVAALEAVVEKFGDLNVVVNNAGIAPTTPIETITPEQFHQVYNINVGGVLWGTQAATALFRKLGHGGKIINATSQAGVVGNPNLMLYSSSKFAVRGMTQIAARDLAEEGITVNAYAPGIVKTPMMFDIAHQVGKNAGKDDEWGMQTFAKDIAMKRLSEPEDVANVVSFLAGPDSNYITGQTIIVDGGMQFH

SEQ ID NO: 261 - protein, 382 aa, Saccharomyces cerevisiae
MRALAYFKKGDIHFTNDIPRPEIQTDDEVIIDVSWCGICGSDLHEYLDGPIFMPKDGECHKLSNAALPLAMGHEMSGIVSKVGPKVTKVKVGDHVVVDAASSCADLHCWPHSKFYNSKPCDACQRGSENLCTHAGFVGLGVISGGFAEQVVVSQHHIIPVPKEIPLDVAALVEPLSVTWHAVKISGFKKGSSALVLGAGPIGLCTILVLKGMGASKIVVSEIAERRIEMAKKLGVEVFNPSKHGHKSIEILRGLTKSHDGFDYSYDCSGIQVTFETSLKALTFKGTATNIAVWGPKPVPFQPMDVTLQEKVMTGSIGYVVEAFEEVVRAIHNGDIAMEDCKQLITGKQRIEDGWEKGFQELMDHKESNVKILLTPNNHGEMK

SEQ ID NO: 262 - protein, 367 aa, Escherichia coli
MDRIIQSPGKYIQGADVINRLGEYLKPLAERWLVVGDKFVLGFAQSTVEKSFKDAGLVVEIAPFGGECSQNEIDRLRGIAETAQCGAILGIGGGKTLDTAKALAHFMGVPVAIAPTIASTDAPCSALSVIYTDEGEFDRYLLLPNNPNMVIVDTKIVAGAPARLLAAGIGDALATWFEARACSRSGATTMAGGKCTQAALALAELCYNTLLEEGEKAMLAAEQHVVTPALERVIEANTYLSGVGFESGGLAAAHAVHNGLTAIPDAHHYYHGEKVAFGTLTQLVLENAPVEEIETVAALSHAVGLPITLAQLDIKEDVPAKMRIVAEAACAEGETIHNMPGGATPDQVYAALLVADQYGQRFLQEWE

SEQ ID NO: 263 - protein, 364 aa, Zygoascus ofunaensis
MMKALCYLGSKTIKWQTVAKPTLKSPTDVIGKLSALTLCGSDLHIIAGHVKESTDIAESQPGRGLILGHEGIIKVEEVGDAVKNFKRGDVCIVSCITSCGECYYCKRDLQSHCNRTEGTSGWILGHEIDGTQAEYVRIPYADQSLYKAPENVPIESLLMLSDILPTAYEVGVVSGNVKKGDTVAIVGLGPVGLSALLSAKALDPAKIIAIDMDDSRLEVARRLGAHETINPGKQDAAKLVHELTASEGKSSGVDVAIECVGVPATFEMCEDLLCPGGHLSNVGVHGSSVELKLQELWIKNISISTGLVSAYSTETLLQKVIDKKLDPTPLATHHFKLSEIEKAYDVFSHAADNQAIKMVITCDE

SEQ ID NO: 264 - protein, 336 aa, Candida parapsilosis
MSIPSSQYGFVFNKQSGLNLRNDLPVHKPKAGQLLLKVDAVGLCHSDLHVIYEGLDCGDNYVMGHEIAGTVAAVGDDVINYKVGDRVACVGPNGCGGCKYCRGAIDNVCKNAFGDWFGLGYDGGYQQYLLVTRPRNLSRIPDNVSADVAAASTDAVLTPYHAIKMAQVSPTSNILLIGAGGLGGNAIQVAKAFGAKVTVLDKKKEARDQAKKLGADAVYETLPESISPGSFSACFDFVSVQATFDVCQKYVEPKGVIMPVGLGAPNLSFNLGDLALREIRILGSFWGTTNDLDDVLKLVSEGKVKPVVRSAKLKELPEYIEKLRNNAYEGRVVFNP

SEQ ID NO: 265 - protein, 369 aa, Cyberlindnera jadinii
MLRTNLRTFARPQFIRGLATAPVIPKTQKGVIFYENGGELQYKDIPVPEPKPNEILVNVKYSGVCHTDLHAWKGDWPLPVKLPLVGGHEGAGIVVAKGSEVKNFEIGDYAGIKWLNGSCMSCELCEKGYESNCLQADLSGYTHDGSFQQYATADAVQAAQIPKNVDLAEISPILCAGVTVYKALKTADLAPGQWVAISGAAGGLGSLAVQYAKAMGLRVLGIDGGAEKEKLFKSLGGEIFIDFTKEKNIVEAIQEATNGGPHGVINVSVAEAAISQSTEYVRPTGTVVLVGLPAGAVCKSEVFSHVVKSISIKGSYVGNRADTREAIDFFERGLVRSPIKIVGLSELPEVYKLMEQGKILGRYVVDTTK

SEQ ID NO: 266 - protein, 346 aa, Rhodococcus ruber
MKALQYTEIGSEPVVVDVPTPAPGPGEILLKVTAAGLCHSDIFVMDMPAEQYIYGLPLTLGHEGVGTVAELGAGVTGFETGDAVAVYGPWGCGACHACARGRENYCTRAAELGITPPGLGSPGSMAEYMIVDSARHLVPIGDLDPVAAVPLTDAGLTPYHAISRVLPLLGPGSTAVVIGVGGLGHVGIQILRAVSAARVIAVDLDDDRLALAREVGADAAVKSGAGAADAIRELTGGEGATAVFDFVGAQSTIDTAQQVVAIDGHISVVGIHAGAHAKVGFFMIPFGASVVTPYWGTRSELMDVVDLARAGRLDIHTETFTLDEGPTAYRRLREGSIRGRGVVVPG

SEQ ID NO: 267 - DNA, 60 bp, Artificial Sequence
  Synthetic Construct
caagcttgcatgcctgcaggtcgactctagattagcccatgtgcaggccaccgttcaggg

SEQ ID NO: 268 - DNA, 60 bp, Artificial Sequence
  Synthetic Construct
gaacggtggcctgcacatgggctaatctagagtcgacctgcaggcatgcaagcttggctg

SEQ ID NO: 269 - DNA, 18 bp, Artificial Sequence
  Synthetic Construct
gtgcatggctgtcttccg

SEQ ID NO: 270 - DNA, 19 bp, Artificial Sequence
  Synthetic Construct
gcacacgctgctgaaaaag

SEQ ID NO: 271 - DNA, 23 bp, Artificial Sequence
  Synthetic Construct
acgcaattatcaaacacccgtcc

SEQ ID NO: 272 - DNA, 24 bp, Artificial Sequence
  Synthetic Construct
ggaagagccgtctattgagaacac

SEQ ID NO: 273 - DNA, 20 bp, Artificial Sequence
  Synthetic Construct
gcacccgtacatcaagctgc

SEQ ID NO: 274 - DNA, 60 bp, Artificial Sequence
  Synthetic Construct
tcatcatgagaatctctacttccagggtaccggcgccatgaataaagacaccctgattcc

SEQ ID NO: 275 - DNA, 60 bp, Artificial Sequence
  Synthetic Construct
gttagcagccggatctcagtggtggtggtggtggtgctcgagtttagccggccagaacac

SEQ ID NO: 276 - DNA, 60 bp, Artificial Sequence
  Synthetic Construct
catcatgagaatctctacttccagggtaccggcgccatgattaaggacactctcgtaagc

SEQ ID NO: 277 - DNA, 60 bp, Artificial Sequence
  Synthetic Construct
agcagccggatctcagtggtggtggtggtggtgctcgagtttaacccgccagaacacaac

SEQ ID NO: 278 - DNA, 60 bp, Artificial Sequence
  Synthetic Construct
catcatcatgagaatctctacttccagggtaccggcgccatgaaagagggtgtaattcgc

SEQ ID NO: 279 - DNA, 60 bp, Artificial Sequence
  Synthetic Construct
tagcagccggatctcagtggtggtggtggtggtgctcgagtttaacgaatgctaaaggcg

SEQ ID NO: 280 - DNA, 60 bp, Artificial Sequence
  Synthetic Construct
catcatcatcatgagaatctctacttccagggtaccggcgccatggaacgcaacttgtcg

SEQ ID NO: 281 - DNA, 60 bp, Artificial Sequence
  Synthetic Construct
agcagccggatctcagtggtggtggtggtggtgctcgagtttaaccggccagaacgcaac

SEQ ID NO: 282 - DNA, 60 bp, Artificial Sequence
  Synthetic Construct
agcggataacaatttcacacaggaaacaggatccgaattcaaaaaaggaggtaaaaaatg

SEQ ID NO: 283 - DNA, 60 bp, Artificial Sequence
  Synthetic Construct
cattttttacctccttttttgaattcggatcctgtttcctgtgtgaaattgttatccgct

SEQ ID NO: 284 - DNA, 60 bp, Artificial Sequence
  Synthetic Construct
actttgaaccacagcattaggacctcctctggtaagctctagattaacccgccagaacac

SEQ ID NO: 285 - DNA, 60 bp, Artificial Sequence
  Synthetic Construct
tttgaaccacagcattaggacctcctctggtaagctctagattaacgaatgctaaaggcg

SEQ ID NO: 286 - DNA, 60 bp, Artificial Sequence
  Synthetic Construct
actttgaaccacagcattaggacctcctctggtaagctctagattaaccggccagaacgc

SEQ ID NO: 287 - DNA, 25 bp, Artificial Sequence
  Synthetic Construct
gaagataagattctgaaacatgagc

SEQ ID NO: 288 - DNA, 60 bp, Artificial Sequence
  Synthetic Construct
agattaaagttgttcatctttacctcctgatagaagtctcgagttagccggccagaacac

SEQ ID NO: 289 - DNA, 60 bp, Artificial Sequence
  Synthetic Construct
tggccggctaactcgagacttctatcaggaggtaaagatgaacaactttaatctgcacac

SEQ ID NO: 290 - DNA, 60 bp, Artificial Sequence
  Synthetic Construct
tcatgtttgacagcttatcatcgataagcttgagctcttagcgggcggcttcgtatatac

SEQ ID NO: 291 - DNA, 60 bp, Artificial Sequence
  Synthetic Construct
atcattctgttagccattgtctccccccctgcgccggctcgagttagccggccagaacac

SEQ ID NO: 292 - DNA, 60 bp, Artificial Sequence
  Synthetic Construct
ggccggctaactcgagccggcgcagggggggagacaatggctaacagaatgattctgaac

SEQ ID NO: 293 - DNA, 60 bp, Artificial Sequence
  Synthetic Construct
gctcatgtttgacagcttatcatcgataagcttgagctcttaccaggcggtatggtaaag

SEQ ID NO: 294 - DNA, 17 bp, Artificial Sequence
  Synthetic Construct
ttagccggccagaacac

SEQ ID NO: 295 - DNA, 90 bp, Artificial Sequence
  Synthetic Construct
gtaacttcacgcgccaacgtcgttgtgttctggccggctaactcgagacttctatcaggaggtaaagatgaacaactttaatctgcacac

SEQ ID NO: 296 - DNA, 25 bp, Artificial Sequence
  Synthetic Construct
ggtattaactacgaggcagaagttg

SEQ ID NO: 297 - DNA, 40 bp, Artificial Sequence
  Synthetic Construct
gttccctactctcgcatgggctgaccccacactaccatcg

SEQ ID NO: 298 - DNA, 40 bp, Artificial Sequence
  Synthetic Construct
cgatggtagtgtggggtcagcccatgcgagagtagggaac

SEQ ID NO: 299 - DNA, 18 bp, Artificial Sequence
  Synthetic Construct
cagcttccgatggctgcc

SEQ ID NO: 300 - DNA, 60 bp, Artificial Sequence
  Synthetic Construct
ctgataaatctggagccggtgagcgtgggtgacgcggtatcattgcagcactggggccag

SEQ ID NO: 301 - DNA, 60 bp, Artificial Sequence
  Synthetic Construct
ctggccccagtgctgcaatgataccgcgtcacccacgctcaccggctccagatttatcag
